(19) United States
(12) Patent Application Publication
(10) Pub. No.: US 2026/0209768 A1
(43) Pub. Date: Jul. 23, 2026

(54) GUIDE RNAS THAT TARGET FOXP3 GENE AND METHODS OF USE

(71) Applicant: Life Edit Therapeutics, Inc., Durham, NC (US)

(72) Inventors: Philip Borden, Durham, NC (US); Michael Coyle, Chapel Hill, NC (US); Alexandra Briner Crawley, Cary, NC (US); Drew Kelso, Holly Springs, NC (US); Michael Vanden Oever, New Hill, NC (US)

(73) Assignee: Life Edit Therapeutics, Inc., Durham, NC (US)

(21) Appl. No.: 19/138,521

(22) PCT Filed: Dec. 15, 2023
(86) PCT No.: PCT/IB2023/062825

§ 371 Date: Jun. 12, 2025

Related U.S. Application Data
(60) Provisional application No. 63/387,888, filed on Dec. 16, 2022.

(51) Int. Cl. C12N 15/113; C12N 5/0783; C12N 9/12; C12N 9/22; C12N 9/78; C12Q 1/6869

(52) U.S. Cl. CPC C12N 15/1136; C12N 5/0636; C12N 9/1276; C12N 9/222; C12N 9/78; C12Q 1/6869; C12Y 207/07049; C12Y 305/04; C12N 2310/20; C12N 2310/315; C12N 2310/321; C12N 2310/346; C12N 2310/531

(57) ABSTRACT

Compositions and methods for binding to a target sequence in a forkhead box P3 (FOXP3) gene are provided. Compositions include CRISPR RNAs, guide RNAs, and nucleic acid molecules encoding the same. Vectors and host cells comprising the nucleic acid molecules are also provided. Further provided are RNA-guided nuclease (RGN) systems for binding a target sequence in a FOXP3 gene, wherein the RGN system comprises an RNA-guided nuclease polypeptide and one or more guide RNAs. The compositions find use in cleaving or modifying a target sequence of an FOXP3 gene, and/or modifying the expression of an FOXP3 gene.

### CROSS-REFERENCE TO RELATED APPLICATIONS

[0001] This application claims priority to U.S. Provisional Application No. 63/387,888, filed Dec. 16, 2022, which is incorporated by reference herein in its entirety.

### REFERENCE TO A SEQUENCE LISTING SUBMITTED ELECTRONICALLY AS AN XML FILE

[0002] The instant application contains a Sequence Listing which has been submitted in xml format via USPTO Patent Center and is hereby incorporated by reference in its entirety. Said xml copy, created on Dec. 7, 2023, is named L103438_1350PCT_0251_7_SL, and is 2.24 MB in size.

### FIELD OF THE INVENTION

[0003] The present invention relates to the field of molecular biology and gene editing.

### BACKGROUND OF THE INVENTION

[0004] T cells are white blood cells that function in the adaptive immune system to attack and destroy foreign molecules, pathogens, and/or tumors. T cells include cytotoxic T cells which kill their targets, along with helper T cells that help other cells of the immune system. Regulatory T cells (Tregs) are helper T cells that play a role in suppressing or modulating other immune cells. This Treg function is important to ensure that the immune system does not attack ‘self’ molecules of the body and to suppress exaggerated immune responses. Forkhead box P3 (Foxp3) is a transcription factor associated with Tregs that regulates Treg development and functions by activating or repressing other genes. The ability to manipulate expression of Foxp3 would be invaluable in controlling the function of a T cell to either encourage immune suppression in an inflammatory or autoimmune setting or to reduce immune suppression in a tumor microenvironment.

[0005] Targeted genome editing or modification is rapidly becoming an important tool for basic and applied research, as it allows modification of genomes such as cutting nucleic acids, deleting nucleic acids, inserting nucleic acids, substituting nucleotides in nucleic acids, and regulating gene expression at specific locations in a genome, along with many other possible modifications. Initial efforts in genome editing involved designing nucleases, proteins that are able to edit nucleic acids, to recognize and bind specifically to a target nucleic acid sequence to be edited. However, engineering nucleases takes considerable time and experimentation to obtain ones effective for editing of a particular sequence. Genome editing systems that use RNA-guided nucleases, such as the Clustered Regularly Interspaced Short Palindromic Repeats (CRISPR)-associated (Cas) proteins of the CRISPR-Cas bacterial system, function by complexing a nuclease with a guide RNA. The hybridization of the guide RNA to a particular target sequence allows editing at a specific location in a genome. Thus, genome editing systems that use RNA-guided nucleases can be less costly and more efficient for editing of genome sequences, as nucleic acids typically can be easier to design and re-design as compared to a nuclease.

[0006] Thus, regulation of expression of Foxp3 would benefit from development of RNA-guided nuclease systems that are able to target specific regions of the FOXP3 gene for binding, cleavage, and/or modification.

### BRIEF SUMMARY OF THE INVENTION

[0007] Compositions and methods for binding a target sequence in the forkhead box P3 (FOXP3) gene are provided. The compositions find use in modifying the FOXP3 gene at specific regions. Compositions comprise CRISPR RNAs (crRNAs), trans-activating CRISPR RNAs (tracrRNAs), single guide RNAs (sgRNAs), dual guide RNA (dgRNAs), RNA-guided nuclease (RGN) polypeptides, nucleic acid molecules encoding the same, compositions comprising the same, and vectors and host cells comprising the nucleic acid molecules. Also provided are RGN systems and ribonucleoprotein complexes for binding a target sequence in the FOXP3 gene, wherein the RGN system and ribonucleoprotein complex comprises an RGN polypeptide and one or more guide RNAs. Thus, methods disclosed herein are drawn to binding a target sequence in the FOXP3 gene, and in some embodiments, cleaving or modifying the target sequence in the FOXP3 gene. The FOXP3 gene can be modified, for example, to be knocked out as a result of non-homologous end joining after cleavage of a target sequence.

[0008] In one aspect, the present disclosure provides a guide RNA (gRNA) comprising a CRISPR RNA (crRNA) and a trans-activating CRISPR RNA (tracrRNA), wherein the crRNA comprises (i) a crRNA repeat; and (ii) a spacer, wherein the tracrRNA comprises: (iii) an anti-repeat; and (iv) a tail, wherein the gRNA comprises a first stem loop formed by hybridization of the crRNA repeat and the anti-repeat, wherein the spacer hybridizes to a target sequence in a forkhead box P3 (FOXP3) gene, and wherein the target sequence has the nucleotide sequence set forth as any one of SEQ ID NOs: 2, 4, 6, 8, 10, 12, 14, 16, 18, 20, 22, 24, 26, 28, 30, 32, 34, 36, 38, 40, 42, 44, 46, 48, 50, 52, 54, 56, 58, 60, 62, 64, 66, 68, 70, 72, 74, 76, 78, 80, 82, 84, 86, 88, 90, 92, 94, 96, 98, 100, 102, 104, 106, 108, 110, 112, 114, 116, 118, 120, 122, 124, 126, 128, 130, 132, 134, 136, 138, 140, 142, 144, 146, 148, 150, 152, 154, 156, 158, 160, 162, 164, 166, 168, 170, 172, 174, 176, 178, 180, 182, 184, 186, 188, 190, 192, 194, 196, 198, 200, 202, 204, 206, 208, 210, 212, and 214. In some aspects, the target sequence in a FOXP3 gene that the spacer hybridides to comprises a target strand and a non-target strand.

[0009] In some embodiments of the above aspect, the spacer has a nucleotide sequence that differs in length and/or sequence from any one of SEQ ID NOs: 1, 3, 5, 7, 9, 11, 13, 15, 17, 19, 21, 23, 25, 27, 29, 31, 33, 35, 37, 39, 41, 43, 45, 47, 49, 51, 53, 55, 57, 59, 61, 63, 65, 67, 69, 71, 73, 75, 77, 79, 81, 83, 85, 87, 89, 91, 93, 95, 97, 99, 101, 103, 105, 107, 109, 111, 113, 115, 117, 119, 121, 123, 125, 127, 129, 131, 133, 135, 137, 139, 141, 143, 145, 147, 149, 151, 153, 155, 157, 159, 161, 163, 165, 167, 169, 171, 173, 175, 177, 179, 181, 183, 185, 187, 189, 191, 193, 195, 197, 199, 201, 203, 205, 207, 209, 211, and 213 by 1 to 5 nucleotides. In some embodiments of the above aspect, the spacer has the nucleotide sequence set forth as any one of SEQ ID NOs: 1, 3, 5, 7, 9, 11, 13, 15, 17, 19, 21, 23, 25, 27, 29, 31, 33, 35, 37, 39, 41, 43, 45, 47, 49, 51, 53, 55, 57, 59, 61, 63, 65, 67, 69, 71, 73, 75, 77, 79, 81, 83, 85, 87, 89, 91, 93, 95, 97, 99, 101, 103, 105, 107, 109, 111, 113, 115, 117, 119, 121, 123, 125, 127, 129, 131, 133, 135, 137, 139, 141, 143, 145, 147, 149, 151, 153, 155, 157, 159, 161, 163, 165, 167, 169, 171, 173, 175, 177, 179, 181, 183, 185, 187, 189, 191, 193, 195, 197, 199, 201, 203, 205, 207, 209, 211, and 213.

[0010] In some embodiments of the above aspect, the gRNA is a single guide RNA (sgRNA) comprising the crRNA and the tracrRNA linked by a linker, wherein the sgRNA comprises a backbone and the spacer, and wherein the backbone of the sgRNA comprises the crRNA repeat, the linker, and the tracrRNA. In some embodiments, the linker has a nucleotide sequence set forth as AAAG, GAAA, ACUU, or CAAAGG. In some embodiments, the linker has a nucleotide sequence set forth as AAAG. In some embodiments of the above aspect, the backbone of the sgRNA comprises a total length of at least 85, 90, 95, 100, 105, 110, 115, or 120 nucleotides. In some embodiments of the above aspect, the backbone of the sgRNA comprises a total length of at most 85, 90, 95, 100, 105, 110, 115, or 120 nucleotides. In some embodiments of the above aspect, the backbone of the sgRNA comprises a total length of 86 to 98 nucleotides. In some embodiments of the above aspect, the backbone of the sgRNA comprises a total length of 94 nucleotides. In some embodiments of the above aspect, the backbone of the sgRNA has a nucleotide sequence having at least 80% sequence identity, at least 90% sequence identity, at least 95% sequence identity, or 100% sequence identity to any one of SEQ ID NOs: 563-573.

[0011] In some embodiments of the above aspect, the first stem loop comprises a first stem and a second stem, and wherein the first stem of the first stem loop comprises a total length of at least 3, 4, 5, 6, 7, 8, 9, 10, or 11 base pairs (bp). In some embodiments of the above aspect, the first stem of the first stem loop comprises a total length of at most 3, 4, 5, 6, 7, 8, 9, 10, or 11 bp. In some embodiments, the first stem of the first stem loop comprises a total length of 6 bp. In some embodiments, the first stem of the first stem loop comprises a total length of 3 bp.

[0012] In some embodiments of the above aspect, the tail of the tracrRNA comprises a total length of at least 1, 2, 3, 4, 5, 6, or 7 nucleotides. In some embodiments of the above aspect, the tail of the tracrRNA comprises a total length of at most 1, 2, 3, 4, 5, 6, or 7 nucleotides. In some embodiments, the tail of the tracrRNA comprises a total length of 3 nucleotides. In some embodiments, the tail of the tracrRNA comprises a total length of 1 nucleotide.

[0013] In some embodiments of the above aspect, the gRNA further comprises a second stem loop most proximal to the tail, wherein the second stem loop comprises a first stem and a second stem. In some embodiments of the above aspect, the first stem of the second stem loop comprises a total length of at least 1, 2, 3, 4, 5, or 6 bp. In some embodiments of the above aspect, the first stem of the second stem loop comprises a total length of at most 1, 2, 3, 4, 5, or 6 bp. In some embodiments, the first stem of the second stem loop comprises a total length of 5 bp.

[0014] In some embodiments of the above aspect, the first stem of the first stem loop comprises a total length of 6 bp, the tail of the tracrRNA comprises a total length of 3 nucleotides, and the first stem of the second stem loop comprises a total length of 5 bp.

[0015] In some embodiments of the above aspect, the gRNA is a dual guide RNA (dgRNA). In some embodiments of the above aspect, the crRNA repeat of the dgRNA comprises a total length of at least 10, 11, 12, 13, 14, 15, 16, 17, 18, 19, 20, or 21 nucleotides. In some embodiments of the above aspect, the crRNA repeat of the dgRNA comprises a total length of at most 10, 11, 12, 13, 14, 15, 16, 17, 18, 19, 20, or 21 nucleotides. In some embodiments, the crRNA repeat of the dgRNA comprises a total length of 13 nucleotides. In some embodiments, the crRNA repeat of the dgRNA comprises a total length of 16 nucleotides. In some embodiments, the crRNA repeat of the dgRNA comprises a total length of 21 nucleotides. In some embodiments of the above aspect, the tracrRNA of the dgRNA comprises a total length of at least 65, 70, 75, 80, or 85 nucleotides. In some embodiments of the above aspect, the tracrRNA of the dgRNA comprises a total length of at most 65, 70, 75, 80, or 85 nucleotides. In some embodiments, the tracrRNA of the dgRNA comprises a total length of 74 nucleotides. In some embodiments, the tracrRNA of the dgRNA comprises a total length of 77 nucleotides.

[0016] In some embodiments of the above aspect, the gRNA comprises a total length of at least 85, 90, 95, 100, 105, 110, 115, 120, 125, 130, or 135 nucleotides. In some embodiments of the above aspect, the gRNA comprises a total length of at most 85, 90, 95, 100, 105, 110, 115, 120, 125, 130, or 135 nucleotides. In some embodiments of the above aspect, the gRNA comprises a total length of 106 to 135 nucleotides. In some embodiments of the above aspect, the gRNA comprises a total length of 117 to 119 nucleotides.

[0017] In some embodiments of the above aspect, the gRNA is capable of targeting a bound RNA-guided nuclease (RGN) polypeptide to the target sequence in the FOXP3 gene. In some embodiments of the above aspect, the RGN polypeptide is capable of recognizing a consensus protospacer adjacent motif (PAM) having the nucleotide sequence set forth as NNNNCC. In some embodiments of the above aspect, the RGN polypeptide is capable of recognizing a full protospacer adjacent motif (PAM) having the nucleotide sequence set forth as any one of CAACCCCA, AACCCCAG, TTGTCCAA, CAGGCCTG, GGGTCCTT, CAAGCCCT, ATGCCCAA, CCAACCCC, CATGCCAC, GCCACCAT, GGACCCGA, CCTTCCTT, TTGGCCCT, GGGGCCGA, CTCGCCCA, GCACCCAA, CCCTCCAG, CAGCCCTC, GGCCCCCA, GGGCCCCC, GGCCCCGG, AGGGCCGA, TCCCCCTG, TTCCCCCT, GTTCCCCC, GGTTCCCC, GGGGCCCA, CGGCCCTG, GGGCCCAT, TCGGCCCT, CATGCCTC, GCCTCCTC, TCTTCCTT, TGGCCC, CAGACC, TCGGCC, CTTGCC, GGCCCC, GCAGCC, AAGCCC, GCCTCC, GCCACC, ATCCCC, AAAGCC, CCATCC, CCTTCC, TGGGCC, GGGCCC, CGGGCC, AACCCC, TCGCCC, CATGCC, AGGGCC, TGAACC, CCCGCC, TCTTCC, and GGCTCC.

[0018] In some embodiments of the above aspect, the RGN polypeptide has an amino acid sequence having at least 80% sequence identity to SEQ ID NO: 545; and wherein the target sequence and the spacer are selected from the group consisting of: a) a target sequence having the nucleotide sequence set forth as SEQ ID NO: 156 and a spacer having the nucleotide sequence set forth as SEQ ID NO: 155 or a nucleotide sequence that differs in length and/or sequence from SEQ ID NO: 155 by 1 to 5 nucleotides; b) a target sequence having the nucleotide sequence set forth as SEQ ID NO: 164 and a spacer having the nucleotide sequence set forth as SEQ ID NO: 163 or a nucleotide sequence that differs in length and/or sequence from SEQ ID NO: 163 by 1 to 5 nucleotides; c) a target sequence having the nucleotide sequence set forth as SEQ ID NO: 190 and a spacer having the nucleotide sequence set forth as SEQ ID NO: 189 or a nucleotide sequence that differs in length and/or sequence from SEQ ID NO: 189 by 1 to 5 nucleotides; d) a target sequence having the nucleotide sequence set forth as SEQ ID NO: 180 and a spacer having the nucleotide sequence set forth as SEQ ID NO: 179 or a nucleotide sequence that differs in length and/or sequence from SEQ ID NO: 179 by 1 to 5 nucleotides; e) a target sequence having the nucleotide sequence set forth as SEQ ID NO: 198 and a spacer having the nucleotide sequence set forth as SEQ ID NO: 197 or a nucleotide sequence that differs in length and/or sequence from SEQ ID NO: 197 by 1 to 5 nucleotides; and f) a target sequence having the nucleotide sequence set forth as SEQ ID NO: 194 and a spacer having the nucleotide sequence set forth as SEQ ID NO: 193 or a nucleotide sequence that differs in length and/or sequence from SEQ ID NO: 193 by 1 to 5 nucleotides. In some embodiments of the above aspect, the spacer has the nucleotide sequence set forth as any one of SEQ ID NOs: 155, 163, 189, 179, 197, and 193.

[0019] In some embodiments of the above aspect, the RGN polypeptide has the amino acid sequence set forth as SEQ ID NO: 545. In some embodiments of the above aspect, the crRNA repeat has the nucleotide sequence set forth as SEQ ID NO: 546 or a nucleotide sequence that differs in length and/or sequence from SEQ ID NO: 546 by 1 to 8 nucleotides. In some embodiments of the above aspect, the crRNA repeat has the nucleotide sequence set forth as any one of SEQ ID NOs: 546, 549-552, 839, 842, and 845. In some embodiments of the above aspect, the crRNA has the nucleotide sequence set forth as any one of SEQ ID NOs: 574-692. In some embodiments of the above aspect, the tracrRNA has a nucleotide sequence having at least 80% sequence identity, at least 90% sequence identity, or at least 95% sequence identity to SEQ ID NO: 547. In some embodiments, the tracrRNA has a nucleotide sequence set forth as SEQ ID NO: 547. In some embodiments of the above aspect, the tracrRNA has a nucleotide sequence that differs in length from SEQ ID NO: 547 by 1 to 16 nucleotides. In some embodiments, the tracrRNA has a nucleotide sequence that is 8 nucleotides shorter than SEQ ID NO: 547. In some embodiments, the tracrRNA has a nucleotide sequence that is 11 nucleotides shorter than SEQ ID NO: 547. In some embodiments of the above aspect, the tracrRNA has the nucleotide sequence set forth as any one of SEQ ID NOs: 547, 553-562, 840, 842, and 846.

[0020] In some embodiments of the above aspect, the gRNA has a nucleotide sequence set forth as any one of SEQ ID NOs: 693-834. In some embodiments, the gRNA has a nucleotide sequence set forth as any one of SEQ ID NOs: 693, 694, 695, 696, 697, and 698.

[0021] In some embodiments of the above aspect, the gRNA comprises at least one chemical modification. In some embodiments, the at least one chemical modification comprises a bridged nucleic acid (BNA) modification; 2′-O-methyl (2′-O-Me) modification; 2′-O-methoxy-ethyl (2′MOE) modification; 2′-fluoro (2′-F) modification; 2′F-4′Cα-OMe modification; 2′,4′-di-Cα-OMe modification; 2′-O-methyl 3′phosphorothioate (MS) modification; 2′-O-methyl 3′thiophosphonoacetate (MSP) modification; 2′-O-methyl 3′phosphonoacetate (MP) modification; phosphorothioate (PS) modification; or a combination thereof. In some embodiments, the BNA comprises a 2′,4′ BNA modification. In some embodiments, the 2′,4′ BNA modification is selected from the group consisting of: locked nucleic acid (LNA) modification, BNANC[N-Me]modification, 2′-O,4′-C-ethylene bridged nucleic acid (2′,4′-ENA) modification, and S-constrained ethyl (cEt) modification. In some embodiments, the 2′,4′ BNA is a LNA modification. In some embodiments, the 2′,4′ BNA is a cEt modification. In some embodiments, the at least one chemical modification comprises a BNA modification, 2′-O-Me modification, PS modification, or a combination thereof.

[0022] In some embodiments, the at least one chemical modification comprises 2′-O-methyl 3′phosphorothioate (MS) modifications at the 3 terminal nucleotides at the 5′ end and at the 3 terminal nucleotides at the 3′ end of the gRNA. In some embodiments of the above aspect, the crRNA repeat has the nucleotide sequence set forth as any one of SEQ ID NOs: 940, 942-945, 1228, 1230, and 1232. In some embodiments of the above aspect, the crRNA has the nucleotide sequence set forth as any one of SEQ ID NOs: 967-1085. In some embodiments of the above aspect, the tracrRNA has the nucleotide sequence set forth as any one of SEQ ID NOs: 941, 946-955, 1229, 1231, and 1233. In some embodiments of the above aspect, the gRNA has the nucleotide sequence set forth as any one of SEQ ID NOs: 1086-1227.

[0023] In some embodiments of the above aspect, the gRNA further comprises an extension comprising an edit template for reverse transcriptase (RT) editing.

[0024] In another aspect, the present disclosure provides a guide RNA (gRNA) comprising a CRISPR RNA (crRNA) and a trans-activating CRISPR RNA (tracrRNA), wherein the crRNA comprises (i) a crRNA repeat; and (ii) a spacer, wherein the tracrRNA comprises: (iii) an anti-repeat; and (iv) a tail, wherein the spacer has the nucleotide sequence set forth as any one of SEQ ID NOs: 1, 3, 5, 7, 9, 11, 13, 15, 17, 19, 21, 23, 25, 27, 29, 31, 33, 35, 37, 39, 41, 43, 45, 47, 49, 51, 53, 55, 57, 59, 61, 63, 65, 67, 69, 71, 73, 75, 77, 79, 81, 83, 85, 87, 89, 91, 93, 95, 97, 99, 101, 103, 105, 107, 109, 111, 113, 115, 117, 119, 121, 123, 125, 127, 129, 131, 133, 135, 137, 139, 141, 143, 145, 147, 149, 151, 153, 155, 157, 159, 161, 163, 165, 167, 169, 171, 173, 175, 177, 179, 181, 183, 185, 187, 189, 191, 193, 195, 197, 199, 201, 203, 205, 207, 209, 211, and 213, or has a nucleotide sequence that differs in length and/or sequence from any one of SEQ ID NOs: 1, 3, 5, 7, 9, 11, 13, 15, 17, 19, 21, 23, 25, 27, 29, 31, 33, 35, 37, 39, 41, 43, 45, 47, 49, 51, 53, 55, 57, 59, 61, 63, 65, 67, 69, 71, 73, 75, 77, 79, 81, 83, 85, 87, 89, 91, 93, 95, 97, 99, 101, 103, 105, 107, 109, 111, 113, 115, 117, 119, 121, 123, 125, 127, 129, 131, 133, 135, 137, 139, 141, 143, 145, 147, 149, 151, 153, 155, 157, 159, 161, 163, 165, 167, 169, 171, 173, 175, 177, 179, 181, 183, 185, 187, 189, 191, 193, 195, 197, 199, 201, 203, 205, 207, 209, 211, and 213 by 1 to 5 nucleotides.

[0025] In some embodiments of the above gRNA aspect, the spacer has the nucleotide sequence set forth as any one of SEQ ID NOs: 1, 3, 5, 7, 9, 11, 13, 15, 17, 19, 21, 23, 25, 27, 29, 31, 33, 35, 37, 39, 41, 43, 45, 47, 49, 51, 53, 55, 57, 59, 61, 63, 65, 67, 69, 71, 73, 75, 77, 79, 81, 83, 85, 87, 89, 91, 93, 95, 97, 99, 101, 103, 105, 107, 109, 111, 113, 115, 117, 119, 121, 123, 125, 127, 129, 131, 133, 135, 137, 139, 141, 143, 145, 147, 149, 151, 153, 155, 157, 159, 161, 163, 165, 167, 169, 171, 173, 175, 177, 179, 181, 183, 185, 187, 189, 191, 193, 195, 197, 199, 201, 203, 205, 207, 209, 211, and 213. In some embodiments of the above gRNA aspect, the spacer is capable of hybridizing to a target sequence set forth as any one of SEQ ID NOs: 2, 4, 6, 8, 10, 12, 14, 16, 18, 20, 22, 24, 26, 28, 30, 32, 34, 36, 38, 40, 42, 44, 46, 48, 50, 52, 54, 56, 58, 60, 62, 64, 66, 68, 70, 72, 74, 76, 78, 80, 82, 84, 86, 88, 90, 92, 94, 96, 98, 100, 102, 104, 106, 108, 110, 112, 114, 116, 118, 120, 122, 124, 126, 128, 130, 132, 134, 136, 138, 140, 142, 144, 146, 148, 150, 152, 154, 156, 158, 160, 162, 164, 166, 168, 170, 172, 174, 176, 178, 180, 182, 184, 186, 188, 190, 192, 194, 196, 198, 200, 202, 204, 206, 208, 210, 212, and 214.

[0026] In another aspect, the present disclosure provides a nucleic acid molecule comprising a CRISPR RNA (crRNA) or encoding a crRNA, wherein the crRNA comprises a spacer and a crRNA repeat, wherein the spacer hybridizes to a target sequence in a forkhead box P3 (FOXP3) gene, and wherein the target sequence has the nucleotide sequence set forth as any one of SEQ ID NOs: 2, 4, 6, 8, 10, 12, 14, 16, 18, 20, 22, 24, 26, 28, 30, 32, 34, 36, 38, 40, 42, 44, 46, 48, 50, 52, 54, 56, 58, 60, 62, 64, 66, 68, 70, 72, 74, 76, 78, 80, 82, 84, 86, 88, 90, 92, 94, 96, 98, 100, 102, 104, 106, 108, 110, 112, 114, 116, 118, 120, 122, 124, 126, 128, 130, 132, 134, 136, 138, 140, 142, 144, 146, 148, 150, 152, 154, 156, 158, 160, 162, 164, 166, 168, 170, 172, 174, 176, 178, 180, 182, 184, 186, 188, 190, 192, 194, 196, 198, 200, 202, 204, 206, 208, 210, 212, and 214.

[0027] In some embodiments of the nucleic acid molecule aspect, the spacer has a nucleotide sequence that differs in length and/or sequence from any one of SEQ ID NOs: 1, 3, 5, 7, 9, 11, 13, 15, 17, 19, 21, 23, 25, 27, 29, 31, 33, 35, 37, 39, 41, 43, 45, 47, 49, 51, 53, 55, 57, 59, 61, 63, 65, 67, 69, 71, 73, 75, 77, 79, 81, 83, 85, 87, 89, 91, 93, 95, 97, 99, 101, 103, 105, 107, 109, 111, 113, 115, 117, 119, 121, 123, 125, 127, 129, 131, 133, 135, 137, 139, 141, 143, 145, 147, 149, 151, 153, 155, 157, 159, 161, 163, 165, 167, 169, 171, 173, 175, 177, 179, 181, 183, 185, 187, 189, 191, 193, 195, 197, 199, 201, 203, 205, 207, 209, 211, and 213 by 1 to 5 nucleotides. In some embodiments, the spacer has the nucleotide sequence set forth as any one of SEQ ID NOs: 1, 3, 5, 7, 9, 11, 13, 15, 17, 19, 21, 23, 25, 27, 29, 31, 33, 35, 37, 39, 41, 43, 45, 47, 49, 51, 53, 55, 57, 59, 61, 63, 65, 67, 69, 71, 73, 75, 77, 79, 81, 83, 85, 87, 89, 91, 93, 95, 97, 99, 101, 103, 105, 107, 109, 111, 113, 115, 117, 119, 121, 123, 125, 127, 129, 131, 133, 135, 137, 139, 141, 143, 145, 147, 149, 151, 153, 155, 157, 159, 161, 163, 165, 167, 169, 171, 173, 175, 177, 179, 181, 183, 185, 187, 189, 191, 193, 195, 197, 199, 201, 203, 205, 207, 209, 211, and 213.

[0028] In some embodiments of the nucleic acid molecule aspect, the crRNA is capable of binding a trans-activating CRISPR RNA (tracrRNA) to form a guide RNA (gRNA), wherein the tracrRNA comprises an anti-repeat and a tail. In some embodiments of the nucleic acid molecule aspect, the gRNA is a single guide RNA (sgRNA) comprising the crRNA and the tracrRNA linked by a linker, wherein the sgRNA comprises a backbone and the spacer, and wherein the backbone of the sgRNA comprises the crRNA repeat, the linker, and the tracrRNA. In some embodiments, the backbone of the sgRNA comprises a total length of 86 to 98 nucleotides. In some embodiments, the backbone of the sgRNA comprises a total length of 94 nucleotides. In some embodiments, the backbone of the sgRNA has a nucleotide sequence having at least 80% sequence identity, at least 90% sequence identity, at least 95% sequence identity, or 100% sequence identity to any one of SEQ ID NOs: 563-573.

[0029] In some embodiments of the nucleic acid molecule aspect, the gRNA comprises a first stem loop comprising a first stem and a second stem formed by hybridization of the crRNA repeat and the anti-repeat, wherein the first stem of the first stem loop comprises a total length of at least 3, 4, 5, 6, 7, 8, 9, 10, or 11 bp. In some embodiments of the nucleic acid molecule aspect, the gRNA comprises a first stem loop comprising a first stem and a second stem formed by hybridization of the crRNA repeat and the anti-repeat, wherein the first stem of the first stem loop comprises a total length of at most 3, 4, 5, 6, 7, 8, 9, 10, or 11 bp. In some embodiments, the first stem of the first stem loop comprises a total length of 6 bp. In some embodiments, the first stem of the first stem loop comprises a total length of 3 bp.

[0030] In some embodiments of the nucleic acid molecule aspect, the tail of the tracrRNA comprises a total length of at least 1, 2, 3, 4, 5, 6, or 7 nucleotides. In some embodiments of the nucleic acid molecule aspect, the tail of the tracrRNA comprises a total length of at most 1, 2, 3, 4, 5, 6, or 7 nucleotides. In some embodiments, the tail of the tracrRNA comprises a total length of 3 nucleotides. In some embodiments, the tail of the tracrRNA comprises a total length of 1 nucleotide.

[0031] In some embodiments of the nucleic acid molecule aspect, the gRNA further comprises a second stem loop most proximal to the tail, wherein the second stem loop comprises a first stem and a second stem. In some embodiments of the nucleic acid molecule aspect, the first stem of the second stem loop comprises a total length of at least 1, 2, 3, 4, 5, or 6 bp. In some embodiments of the nucleic acid molecule aspect, the first stem of the second stem loop comprises a total length of at most 1, 2, 3, 4, 5, or 6 bp. In some embodiments, the first stem of the second stem loop comprises a total length of 5 bp.

[0032] In some embodiments of the nucleic acid molecule aspect, the first stem of the first stem loop comprises a total length of 6 bp, the tail of the tracrRNA comprises a total length of 3 nucleotides, and the first stem of the second stem loop comprises a total length of 5 bp.

[0033] In some embodiments of the nucleic acid molecule aspect, the gRNA is a dual guide RNA (dgRNA). In some embodiments of the nucleic acid molecule aspect, the crRNA repeat comprises a total length of at least 10, 11, 12, 13, 14, 15, 16, 17, 18, 19, 20, or 21 nucleotides. In some embodiments of the nucleic acid molecule aspect, the crRNA repeat comprises a total length of at most 10, 11, 12, 13, 14, 15, 16, 17, 18, 19, 20, or 21 nucleotides. In some embodiments, the crRNA repeat comprises a total length of 13 nucleotides. In some embodiments, the crRNA repeat comprises a total length of 16 nucleotides. In some embodiments, the crRNA repeat comprises a total length of 21 nucleotides. In some embodiments of the nucleic acid molecule aspect, the tracrRNA comprises a total length of at least 65, 70, 75, 80, or 85 nucleotides. In some embodiments of the nucleic acid molecule aspect, the tracrRNA comprises a total length of at most 65, 70, 75, 80, or 85 nucleotides. In some embodiments, the tracrRNA comprises a total length of 74 nucleotides. In some embodiments, the tracrRNA comprises a total length of 77 nucleotides.

[0034] In some embodiments of the nucleic acid molecule aspect, the gRNA comprises a total length of at least 85, 90, 95, 100, 105, 110, 115, 120, 125, 130, or 135 nucleotides. In some embodiments of the nucleic acid molecule aspect, the gRNA comprises a total length of at most 85, 90, 95, 100, 105, 110, 115, 120, 125, 130, or 135 nucleotides. In some embodiments, the gRNA comprises a total length of 106 to 135 nucleotides. In some embodiments, the gRNA comprises a total length of 117 to 119 nucleotides. In some embodiments, the gRNA is capable of targeting a bound RNA-guided nuclease (RGN) polypeptide to a target sequence.

[0035] In some embodiments of the nucleic acid molecule aspect, the gRNA is capable of binding to an RGN polypeptide capable of recognizing a consensus protospacer adjacent motif (PAM) having the nucleotide sequence set forth as NNNNCC. In some embodiments, the gRNA is capable of binding to an RGN polypeptide capable of recognizing a full protospacer adjacent motif (PAM) having the nucleotide sequence set forth as any one of CAACCCCA, AACCCCAG, TTGTCCAA, CAGGCCTG, GGGTCCTT, CAAGCCCT, ATGCCCAA, CCAACCCC, CATGCCAC, GCCACCAT, GGACCCGA, CCTTCCTT, TTGGCCCT, GGGGCCGA, CTCGCCCA, GCACCCAA, CCCTCCAG, CAGCCCTC, GGCCCCCA, GGGCCCCC, GGCCCCGG, AGGGCCGA, TCCCCCTG, TTCCCCCT, GTTCCCCC, GGTTCCCC, GGGGCCCA, CGGCCCTG, GGGCCCAT, TCGGCCCT, CATGCCTC, GCCTCCTC, TCTTCCTT, TGGCCC, CAGACC, TCGGCC, CTTGCC, GGCCCC, GCAGCC, AAGCCC, GCCTCC, GCCACC, ATCCCC, AAAGCC, CCATCC, CCTTCC, TGGGCC, GGGCCC, CGGGCC, AACCCC, TCGCCC, CATGCC, AGGGCC, TGAACC, CCCGCC, TCTTCC, and GGCTCC.

[0036] In some embodiments of the nucleic acid molecule aspect, the RGN polypeptide comprises an amino acid sequence having at least 80% sequence identity to SEQ ID NO: 545; and wherein the target sequence and the spacer are selected from the group consisting of: a) a target sequence having the nucleotide sequence set forth as SEQ ID NO: 156 and a spacer having the nucleotide sequence set forth as SEQ ID NO: 155 or a nucleotide sequence that differs in length and/or sequence from SEQ ID NO: 155 by 1 to 5 nucleotides; b) a target sequence having the nucleotide sequence set forth as SEQ ID NO: 164 and a spacer having the nucleotide sequence set forth as SEQ ID NO: 163 or a nucleotide sequence that differs in length and/or sequence from SEQ ID NO: 163 by 1 to 5 nucleotides; c) a target sequence having the nucleotide sequence set forth as SEQ ID NO: 190 and a spacer having the nucleotide sequence set forth as SEQ ID NO: 189 or a nucleotide sequence that differs in length and/or sequence from SEQ ID NO: 189 by 1 to 5 nucleotides; d) a target sequence having the nucleotide sequence set forth as SEQ ID NO: 180 and a spacer having the nucleotide sequence set forth as SEQ ID NO: 179 or a nucleotide sequence that differs in length and/or sequence from SEQ ID NO: 179 by 1 to 5 nucleotides; e) a target sequence having the nucleotide sequence set forth as SEQ ID NO: 198 and a spacer having the nucleotide sequence set forth as SEQ ID NO: 197 or a nucleotide sequence that differs in length and/or sequence from SEQ ID NO: 197 by 1 to 5 nucleotides; and f) a target sequence having the nucleotide sequence set forth as SEQ ID NO: 194 and a spacer having the nucleotide sequence set forth as SEQ ID NO: 193 or a nucleotide sequence that differs in length and/or sequence from SEQ ID NO: 193 by 1 to 5 nucleotides. In some embodiments of the above aspect, the spacer has the nucleotide sequence set forth as any one of SEQ ID NOs: 155, 163, 189, 179, 197, and 193.

[0037] In some embodiments of the nucleic acid molecule aspect, the RGN polypeptide comprises an amino acid sequence set forth as SEQ ID NO: 545. In some embodiments of the nucleic acid molecule aspect, the crRNA repeat has the nucleotide sequence set forth as SEQ ID NO: 546 or a nucleotide sequence that differs in length and/or sequence from SEQ ID NO: 546 by 1 to 8 nucleotides. In some embodiments of the nucleic acid molecule aspect, the crRNA repeat has the nucleotide sequence set forth as any one of SEQ ID NOs: 546, 549-552, 839, 842, and 845. In some embodiments of the nucleic acid molecule aspect, the crRNA has the nucleotide sequence set forth as any one of SEQ ID NOs: 574-692. In some embodiments of the nucleic acid molecule aspect, the tracrRNA has a nucleotide sequence having at least 80% sequence identity, at least 90% sequence identity, or at least 95% sequence identity to SEQ ID NO: 547. In some embodiments, the tracrRNA has a nucleotide sequence set forth as SEQ ID NO: 547. In some embodiments of the nucleic acid molecule aspect, the tracrRNA has a nucleotide sequence that differs in length from SEQ ID NO: 547 by 1 to 16 nucleotides. In some embodiments, the tracrRNA has a nucleotide sequence that is 8 nucleotides shorter than SEQ ID NO: 547. In some embodiments, the tracrRNA has a nucleotide sequence that is 11 nucleotides shorter than SEQ ID NO: 547. In some embodiments of the nucleic acid molecule aspect, the tracrRNA has the nucleotide sequence set forth as any one of SEQ ID NOs: 547, 553-562, 840, 842, and 846.

[0038] In some embodiments of the nucleic acid molecule aspect, the gRNA has a nucleotide sequence set forth as any one of SEQ ID NOs: 693-834. In some embodiments, the gRNA has a nucleotide sequence set forth as any one of SEQ ID NOs: 693, 694, 695, 696, 697, and 698.

[0039] In some embodiments of the nucleic acid molecule aspect, the gRNA comprises at least one chemical modification. In some embodiments, the at least one chemical modification comprises a bridged nucleic acid (BNA) modification; 2′-O-methyl (2′-O-Me) modification; 2′-O-methoxy-ethyl (2′MOE) modification; 2′-fluoro (2′-F) modification; 2′F-4′Cα-OMe modification; 2′,4′-di-Cα-OMe modification; 2′-O-methyl 3′phosphorothioate (MS) modification; 2′-O-methyl 3′thiophosphonoacetate (MSP) modification; 2′-O-methyl 3′phosphonoacetate (MP) modification; phosphorothioate (PS) modification; or a combination thereof. In some embodiments, the BNA comprises a 2′,4′ BNA modification. In some embodiments, the 2′,4′ BNA modification is selected from the group consisting of: locked nucleic acid (LNA) modification, BNANC[N-Me]modification, 2′-0,4′-C-ethylene bridged nucleic acid (2′,4′-ENA) modification, and S-constrained ethyl (cEt) modification. In some embodiments, the 2′,4′ BNA is a LNA modification. In some embodiments, the 2′,4′ BNA is a cEt modification. In some embodiments, the at least one chemical modification comprises a BNA modification, 2′-O-Me modification, PS modification, or a combination thereof.

[0040] In some embodiments, the at least one chemical modification comprises 2′-O-methyl 3′phosphorothioate (MS) modifications at the 3 terminal nucleotides at the 5′ end and at the 3 terminal nucleotides at the 3′ end of the gRNA. In some embodiments of the nucleic acid molecule aspect, the crRNA repeat has the nucleotide sequence set forth as any one of SEQ ID NOs: 940, 942-945, 1228, 1230, and 1232. In some embodiments of the nucleic acid molecule aspect, the crRNA has the nucleotide sequence set forth as any one of SEQ ID NOs: 967-1085. In some embodiments of the nucleic acid molecule aspect, the tracrRNA has the nucleotide sequence set forth as any one of SEQ ID NOs: 941, 946-955, 1229, 1231, and 1233. In some embodiments of the nucleic acid molecule aspect, the gRNA has the nucleotide sequence set forth as any one of SEQ ID NOs: 1086-1227.

[0041] In some embodiments of the nucleic acid molecule aspect, the gRNA further comprises an extension comprising an edit template for reverse transcriptase (RT) editing.

[0042] In yet another aspect, the present disclosure provides a nucleic acid molecule comprising a CRISPR RNA (crRNA) or encoding a crRNA, wherein the crRNA comprises a spacer and a crRNA repeat, wherein the spacer has the nucleotide sequence set forth as any one of SEQ ID NOs: 1, 3, 5, 7, 9, 11, 13, 15, 17, 19, 21, 23, 25, 27, 29, 31, 33, 35, 37, 39, 41, 43, 45, 47, 49, 51, 53, 55, 57, 59, 61, 63, 65, 67, 69, 71, 73, 75, 77, 79, 81, 83, 85, 87, 89, 91, 93, 95, 97, 99, 101, 103, 105, 107, 109, 111, 113, 115, 117, 119, 121, 123, 125, 127, 129, 131, 133, 135, 137, 139, 141, 143, 145, 147, 149, 151, 153, 155, 157, 159, 161, 163, 165, 167, 169, 171, 173, 175, 177, 179, 181, 183, 185, 187, 189, 191, 193, 195, 197, 199, 201, 203, 205, 207, 209, 211, and 213, or has a nucleotide sequence that differs in length and/or sequence from any one of SEQ ID NOs: 1, 3, 5, 7, 9, 11, 13, 15, 17, 19, 21, 23, 25, 27, 29, 31, 33, 35, 37, 39, 41, 43, 45, 47, 49, 51, 53, 55, 57, 59, 61, 63, 65, 67, 69, 71, 73, 75, 77, 79, 81, 83, 85, 87, 89, 91, 93, 95, 97, 99, 101, 103, 105, 107, 109, 111, 113, 115, 117, 119, 121, 123, 125, 127, 129, 131, 133, 135, 137, 139, 141, 143, 145, 147, 149, 151, 153, 155, 157, 159, 161, 163, 165, 167, 169, 171, 173, 175, 177, 179, 181, 183, 185, 187, 189, 191, 193, 195, 197, 199, 201, 203, 205, 207, 209, 211, and 213 by 1 to 5 nucleotides.

[0043] In some embodiments of the above nucleic acid molecule aspect, the spacer has the nucleotide sequence set forth as any one of SEQ ID NOs: 1, 3, 5, 7, 9, 11, 13, 15, 17, 19, 21, 23, 25, 27, 29, 31, 33, 35, 37, 39, 41, 43, 45, 47, 49, 51, 53, 55, 57, 59, 61, 63, 65, 67, 69, 71, 73, 75, 77, 79, 81, 83, 85, 87, 89, 91, 93, 95, 97, 99, 101, 103, 105, 107, 109, 111, 113, 115, 117, 119, 121, 123, 125, 127, 129, 131, 133, 135, 137, 139, 141, 143, 145, 147, 149, 151, 153, 155, 157, 159, 161, 163, 165, 167, 169, 171, 173, 175, 177, 179, 181, 183, 185, 187, 189, 191, 193, 195, 197, 199, 201, 203, 205, 207, 209, 211, and 213.

[0044] In some embodiments of the above nucleic acid molecule aspect, the spacer is capable of hybridizing to a target sequence, and wherein the target sequence has the nucleotide sequence set forth as any one of SEQ ID NOs: 2, 4, 6, 8, 10, 12, 14, 16, 18, 20, 22, 24, 26, 28, 30, 32, 34, 36, 38, 40, 42, 44, 46, 48, 50, 52, 54, 56, 58, 60, 62, 64, 66, 68, 70, 72, 74, 76, 78, 80, 82, 84, 86, 88, 90, 92, 94, 96, 98, 100, 102, 104, 106, 108, 110, 112, 114, 116, 118, 120, 122, 124, 126, 128, 130, 132, 134, 136, 138, 140, 142, 144, 146, 148, 150, 152, 154, 156, 158, 160, 162, 164, 166, 168, 170, 172, 174, 176, 178, 180, 182, 184, 186, 188, 190, 192, 194, 196, 198, 200, 202, 204, 206, 208, 210, 212, and 214.

[0045] In still another aspect, the present disclosure provides a vector comprising the nucleic acid molecule as described hereinabove, wherein the nucleic acid molecule comprises a polynucleotide encoding the crRNA. In some embodiments of the vector aspect, the nucleic acid molecule further comprises a heterologous promoter operably linked to the polynucleotide encoding the crRNA. In some embodiments, the heterologous promoter is an RNA polymerase III (pol III) promoter. In some embodiments of the vector aspect, the vector further comprises a nucleic acid molecule encoding an RGN polypeptide, wherein the crRNA is capable of binding a tracrRNA to form a guide RNA, wherein the guide RNA is capable of binding to the RGN polypeptide. In some embodiments, the vector further comprises a promoter operably linked to the nucleic acid molecule encoding the RGN polypeptide.

[0046] In yet another aspect, the present disclosure provides a vector comprising the nucleic acid molecule as described hereinabove, wherein the nucleic acid molecule comprises a polynucleotide encoding the crRNA, and wherein the vector further comprises a polynucleotide encoding the tracrRNA. In some embodiments of the vector aspect, the polynucleotide encoding the crRNA and the polynucleotide encoding the tracrRNA are operably linked to the same promoter and are encoded as a sgRNA. In some embodiments of the vector aspect, the polynucleotide encoding the crRNA and the polynucleotide encoding the tracrRNA are operably linked to separate promoters. In some embodiments of the vector aspect, the vector further comprises a nucleic acid molecule encoding an RGN polypeptide, wherein the crRNA is capable of binding the tracrRNA to form a guide RNA, wherein the guide RNA is capable of binding to the RGN polypeptide. In some embodiments, the vector further comprises a promoter operably linked to the nucleic acid molecule encoding the RGN polypeptide.

[0047] In another aspect, the present disclosure provides a cell comprising the gRNA, the nucleic acid molecule, or the vector as described hereinabove.

[0048] In another aspect, the present disclosure provides an RNA-guided nuclease (RGN) system for binding a target sequence in a forkhead box P3 (FOXP3) gene, wherein the RGN system comprises: a) one or more gRNAs as described hereinabove, or one or more polynucleotides comprising one or more nucleotide sequences encoding the one or more gRNAs as described hereinabove; and b) an RGN polypeptide, or a polynucleotide comprising a nucleotide sequence encoding the RGN polypeptide; wherein the one or more guide RNAs are capable of forming a complex with the RGN polypeptide to direct the RGN polypeptide to bind to the target sequence.

[0049] In some embodiments of the RGN system aspect, the RGN polypeptide is capable of recognizing a consensus protospacer adjacent motif (PAM) having the nucleotide sequence set forth as NNNNCC. In some embodiments of the RGN system aspect, the RGN polypeptide is capable of recognizing a full PAM having a nucleotide sequence set forth as any one of CAACCCCA, AACCCCAG, TTGTCCAA, CAGGCCTG, GGGTCCTT, CAAGCCCT, ATGCCCAA, CCAACCCC, CATGCCAC, GCCACCAT, GGACCCGA, CCTTCCTT, TTGGCCCT, GGGGCCGA, CTCGCCCA, GCACCCAA, CCCTCCAG, CAGCCCTC, GGCCCCCA, GGGCCCCC, GGCCCCGG, AGGGCCGA, TCCCCCTG, TTCCCCCT, GTTCCCCC, GGTTCCCC, GGGGCCCA, CGGCCCTG, GGGCCCAT, TCGGCCCT, CATGCCTC, GCCTCCTC, TCTTCCTT, TGGCCC, CAGACC, TCGGCC, CTTGCC, GGCCCC, GCAGCC, AAGCCC, GCCTCC, GCCACC, ATCCCC, AAAGCC, CCATCC, CCTTCC, TGGGCC, GGGCCC, CGGGCC, AACCCC, TCGCCC, CATGCC, AGGGCC, TGAACC, CCCGCC, TCTTCC, and GGCTCC. In some embodiments of the RGN system aspect, the RGN polypeptide comprises an amino acid sequence set forth as SEQ ID NO: 545.

[0050] In some embodiments of the RGN system aspect, the polynucleotide comprising a nucleotide sequence encoding the RGN polypeptide comprises an mRNA. In some embodiments of the RGN system aspect, the polynucleotide comprising a nucleotide sequence encoding the RGN polypeptide is codon optimized for expression in a mammalian cell. In some embodiments of the RGN system aspect, at least one of the one or more nucleotide sequences encoding the one or more gRNAs and the nucleotide sequence encoding the RGN polypeptide is operably linked to a promoter heterologous to the nucleotide sequence. In some embodiments of the RGN system aspect, the one or more nucleotide sequences encoding the one or more gRNAs and the nucleotide sequence encoding the RGN polypeptide are located on one vector. In some embodiments of the RGN system aspect, the RGN polypeptide is nuclease inactive or is a nickase. In some embodiments of the RGN system aspect, the RGN polypeptide is fused to a base-editing polypeptide. In some embodiments, the base-editing polypeptide comprises a deaminase. In some embodiments of the RGN system aspect, the RGN polypeptide is fused to a RT editing polypeptide. In some embodiments, the RT editing polypeptide comprises a DNA polymerase. In some embodiments, the DNA polymerase comprises a reverse transcriptase. In some embodiments of the RGN system aspect, the gRNA further comprises an extension comprising an edit template for RT editing. In some embodiments of the above aspect, the RGN polypeptide comprises one or more nuclear localization signals.

[0051] In still another aspect, the present disclosure provides a ribonucleoprotein (RNP) complex comprising the one or more gRNA and the RGN polypeptide of the RGN system as described hereinabove.

[0052] In still another aspect, the present disclosure provides a cell comprising the RGN system or the RNP complex as described hereinabove. In some embodiments, the cell is a eukaryotic cell. In some embodiments, the eukaryotic cell is a mammalian cell. In some embodiments, the mammalian cell is a human cell. In some embodiments, the mammalian cell or human cell is a T cell or an induced pluripotent stem cell.

[0053] In another aspect, the present disclosure provides a method for binding a target sequence within a FOXP3 gene, comprising delivering the RGN system or the RNP complex as described hereinabove to the target sequence or a cell comprising the target sequence. In some embodiments of the method for binding a target sequence within a FOXP3 gene aspect, cleavage or modification of the target sequence occurs.

[0054] In another aspect, the present disclosure provides a method for assembling an RNA-guided nuclease (RGN) ribonucleoprotein complex, the method comprising combining under conditions suitable for formation of the complex: a) the guide RNA as described hereinabove; and b) an RGN polypeptide that binds the guide RNA. In some embodiments of the above aspect, the RGN polypeptide is capable of recognizing a consensus protospacer adjacent motif (PAM) having the nucleotide sequence set forth as NNNNCC. In some embodiments of the method for assembling an RGN ribonucleoprotein complex aspect, the complex directs cleavage of the target sequence. In some embodiments, the cleavage generates a double-stranded break. In some embodiments, wherein the cleavage generates a single-stranded break.

[0055] In another aspect, the present disclosure provides a method for binding a target sequence within a FOXP3 gene, the method comprising: a) combining under conditions suitable for formation of a ribonucleoprotein (RNP) complex: i) the guide RNA as described hereinabove; and ii) an RGN polypeptide that binds the guide RNA; thereby assembling an RNP complex; and b) contacting the target sequence or a cell comprising the target sequence with the assembled RNP complex; thereby directing binding of the RNP complex to the target sequence. In some embodiments of the above aspect, the RGN polypeptide is capable of recognizing a consensus protospacer adjacent motif (PAM) having the nucleotide sequence set forth as NNNNCC. In some embodiments of the method for binding a target sequence within a FOXP3 gene aspect, the RGN polypeptide is capable of recognizing a full protospacer adjacent motif (PAM) having the nucleotide sequence set forth as any one of CAACCCCA, AACCCCAG, TTGTCCAA, CAGGCCTG, GGGTCCTT, CAAGCCCT, ATGCCCAA, CCAACCCC, CATGCCAC, GCCACCAT, GGACCCGA, CCTTCCTT, TTGGCCCT, GGGGCCGA, CTCGCCCA, GCACCCAA, CCCTCCAG, CAGCCCTC, GGCCCCCA, GGGCCCCC, GGCCCCGG, AGGGCCGA, TCCCCCTG, TTCCCCCT, GTTCCCCC, GGTTCCCC, GGGGCCCA, CGGCCCTG, GGGCCCAT, TCGGCCCT, CATGCCTC, GCCTCCTC, TCTTCCTT, TGGCCC, CAGACC, TCGGCC, CTTGCC, GGCCCC, GCAGCC, AAGCCC, GCCTCC, GCCACC, ATCCCC, AAAGCC, CCATCC, CCTTCC, TGGGCC, GGGCCC, CGGGCC, AACCCC, TCGCCC, CATGCC, AGGGCC, TGAACC, CCCGCC, TCTTCC, and GGCTCC. In some embodiments of the method for binding a target sequence within a FOXP3 gene aspect, the RGN polypeptide comprises an amino acid sequence set forth as SEQ ID NO: 545.

[0056] In some embodiments of the method for binding a target sequence within a FOXP3 gene aspect, the method is performed in vitro or ex vivo. In some embodiments of the method for binding a target sequence within a FOXP3 gene aspect, the RGN polypeptide is capable of cleaving the target sequence, thereby allowing for the cleaving and/or modifying of the target sequence. In some embodiments, the cleaving generates a double-stranded break. In some embodiments, the cleaving generates a single-stranded break. In some embodiments, the cleaving results in insertion of a heterologous sequence within the target sequence.

[0057] In some embodiments of the method for binding a target sequence within a FOXP3 gene aspect, the RGN polypeptide is nuclease inactive or is a nickase. In some embodiments of the method for binding a target sequence within a FOXP3 gene aspect, the RGN polypeptide is fused to a base-editing polypeptide. In some embodiments, the base-editing polypeptide comprises a deaminase. In some embodiments of the method for binding a target sequence within a FOXP3 gene aspect, the RGN polypeptide is fused to a RT editing polypeptide. In some embodiments, the RT editing polypeptide comprises a DNA polymerase. In some embodiments, the DNA polymerase comprises a reverse transcriptase. In some embodiments of the method for binding a target sequence within a FOXP3 gene aspect, the gRNA further comprises an extension comprising an edit template for RT editing.

[0058] In a further aspect, the present disclosure provides a method for modulating expression of a forkhead box P3 (FOXP3) gene in a population of cells, comprising delivering the RGN system described hereinabove or the RNP complex described hereinabove to the population of cells, wherein the population of cells comprises the target sequence, and wherein FOXP3 gene expression is modulated as compared to FOXP3 gene expression in a control population of cells.

[0059] In some embodiments of the method for modulating expression of a FOXP3 gene aspect, cleavage or modification of the target sequence occurs. In some embodiments, cleavage or modification of the target sequence is detected by sequencing. In some embodiments, FOXP3 gene expression is measured by quantitative PCR, microarray, RNA-seq, flow cytometry, immunoblot, enzyme-linked immunosorbent assay (ELISA), protein immunoprecipitation, immunostaining, high performance liquid chromatography (HPLC), liquid chromatography-mass spectrometry (LC/MS), mass spectrometry, or a combination thereof.

[0060] In some embodiments of the method for modulating expression of a FOXP3 gene aspect, FOXP3 gene expression is decreased. In some embodiments, the decrease in FOXP3 gene expression comprises decrease in FOXP3 mRNA and/or Foxp3 protein level.

[0061] In some embodiments of the method for modulating expression of a FOXP3 gene aspect, cleavage or modification of the target sequence occurs at a rate of 40% to 100%. In some embodiments, cleavage or modification of the target sequence occurs at a rate of 80% to 100%.

[0062] In some embodiments of the method for modulating expression of a FOXP3 gene aspect, the control population of cells has not been subjected to the delivering.

[0063] In some embodiments of the method for modulating expression of a FOXP3 gene aspect, the population of cells comprises T cells.

### BRIEF DESCRIPTION OF THE FIGURES

[0064] FIG. 1 shows that increasing spacer length improves editing of APG07433.1 guide RNAs targeting forkhead box P3 (FOXP3) gene.

[0065] FIG. 2 shows gene editing rate (as % insertions/deletions (indel)) for multiple FOXP3 guide RNAs over a tested dose curve of guide RNA:RGN protein. For each delivery format, the guides are from left to right: SGN 3378, SGN 3379, SGN 3381, SGN3383, and SGN3384.

[0066] FIG. 3 shows consistent editing of FOXP3 guide RNAs at higher doses of ribonucleoprotein (RNP) complex of guide RNA and APG07433.1 RGN. For each guide used, the dose of RNP complex and RGN protein:guide RNA ratio are from left to right: 90 pmol 1:2, 90 pmol 1:3, 120 pmol 1:2, and 120 pmol 1:3.

[0067] FIG. 4 shows multiple guide RNAs having >70% editing at FOXP3 in cells from different donors. For each guide used, the donor and RGN protein:guide RNA ratio are from left to right: Donor 1 (F) 1:2, Donor 1 (F) 1:3, Donor 2 (M) 1:2, Donor 2 (M) 1:3, Donor 3 (F) 1:2, and Donor 3 (F) 1:3.

[0068] FIG. 5 shows multiple guide RNAs having >70% editing at FOXP3 in cells from different donors and across a range of RNP complex doses. For each guide used, the dose of RNP complex is from left to right: 20 pmol, 40 pmol, 60 pmol, and 80 pmol.

[0069] FIG. 6 shows performance of guide RNAs in FOXP3 editing as ratio of editing of guide RNAs with backbone variants and various spacer lengths to guide RNA with native backbone and 25 nt spacer (‘original backbone (135 bp)’). The M backbone has: a deletion of 10 nt in the first stem of stem loop 1 formed by hybridization of the crRNA repeat and anti-repeat; a deletion of 2 nt in stem loop 3 most proximal to the tail of the guide RNA; and a deletion of 4 nt from the tail of the guide RNA; as compared to the native APG07433.1 backbone. The 98bblen has a deletion of 12 nt in the first stem of stem loop 1; the 98bblen_-6 tail has a deletion of 12 nt in the first stem of stem loop 1 and a deletion of 6 nt from the tail; the 98bblen_-6 tail_-2hairpin has a deletion of 12 nt in the first stem of stem loop 1, a deletion of 6 nt from the tail, and a deletion of 2 nt from stem loop 3. The 96bblen has a deletion of 14 nt in the first stem of stem loop 1; the 96bblen_-6 tail has a deletion of 14 nt in the first stem of stem loop 1 and a deletion of 6 nt from the tail; the 96bblen_-6 tail_-2hairpin has a deletion of 14 nt in the first stem of stem loop 1, a deletion of 6 nt from the tail, and a deletion of 2 nt from stem loop 3. The 94bblen has a deletion of 16 nt in the first stem of stem loop 1; the 94bblen_-6 tail has a deletion of 16 nt in the first stem of stem loop 1 and a deletion of 6 nt from the tail; the 94bblen_-6 tail_-2hairpin has a deletion of 16 nt in the first stem of stem loop 1, a deletion of 6 nt from the tail, and a deletion of 2 nt from stem loop 3. For each backbone variant, the guides are from left to right: SGN 3378, SGN 3381, SGN3382, and SGN3384 (indicated as ‘1-4’ in the graph).

[0070] FIG. 7 shows performance of guide RNAs in FOXP3 editing as percent editing of each guide RNA. The backbone variants are as described in FIG. 6. For each backbone variant, the guides are from left to right: SGN 3378, SGN 3381, SGN3382, and SGN3384 (indicated as ‘1-4’ in the graph).

[0071] FIG. 8 shows that the ‘M’ and 94 nt length backbones yielded high gene editing across a number of FOXP3 targets and was dependent upon spacer length. For each guide spacer-backbone format, the guides are from left to right: SGN 3378, SGN 3381, SGN3382, SGN3384, and SGN 5073. The M and 94 nt length backbones are as described in FIG. 6. The gene editing rates for guide RNAs with M or nt length backbones are compared to that for a guide RNA with native backbone and 25 nt spacer (‘original backbone (135 bp)’).

[0072] FIG. 9 shows that truncated guide RNAs (shortened in spacer and/or backbone) were effective at editing multiple FOXP3 target sites across a dose range of RNP complex of guide RNA and APG07433.1 RGN and across multiple donors. For each guide used, the dose of RNP complex is from left to right: 20 pmol, 40 pmol, 60 pmol, and 80 pmol.

[0073] FIG. 10 shows that most truncated guide RNAs showed equal or slightly improved editing as compared to the original guide RNA with native backbone and 25 nt spacer. For each guide used, the dose of RNP complex is from left to right: 20 pmol, 40 pmol, 60 pmol, and 80 pmol.

[0074] FIG. 11 shows that cell viability was at or above 80% for most samples, across multiple donors, and across a dose range of RNP complex of guide RNA and APG07433.1 RGN. For each guide used, the dose of RNP complex is from left to right: 20 pmol, 40 pmol, 60 pmol, and 80 pmol. For the ‘Donor Controls’ graph, the donors are from left to right: Donor 1, Donor 2, and Donor 3.

[0075] FIGS. 12A and 12B show gene editing rate as percent insertions and deletions (indels) in screens to identify effective FOXP3 guide RNAs in association with APG07433.1 RGN. SGN000754 and SGN000755 are control guide RNAs in FIG. 12A. For each guide in FIG. 12A, the % editing with RNP is on the left, and the % editing with mRNA is on the right. SGN002770-SGN002803 are FOXP3 guide RNAs in FIG. 12A. SGN005050-SGN005104 are FOXP3 guide RNAs in FIG. 12B.

[0076] FIG. 13 shows that changes to spacer length can generate a better guide RNA with no significant off-target modifications. For each on target site or predicted in silico off target site, the % indel for edited is on the left, and the % indel for control is on the right.

[0077] FIG. 14 shows that 5 of the 6 lead FOXP3 guide RNAs had no significant off-target modifications. For each on target site or predicted in silico off target site, the % indel for edited is on the left, and the % indel for control is on the right. The control indicates conditions without RGN and gRNA, where cells are mixed with nucleofection solution but do not go through the nucleofection process.

### DETAILED DESCRIPTION

[0078] Many modifications and other embodiments of the inventions set forth herein will come to mind to one skilled in the art to which these inventions pertain having the benefit of the teachings presented in the foregoing descriptions and the associated drawings. Therefore, it is to be understood that the inventions are not to be limited to the specific embodiments disclosed and that modifications and other embodiments are intended to be included within the scope of the appended embodiments. Although specific terms are employed herein, they are used in a generic and descriptive sense only and not for purposes of limitation.

### I. Overview

[0079] RNA-guided nuclease (RGN) systems allow for the targeted manipulation of specific site(s) within a genome and are useful in the context of gene targeting for therapeutic and research applications. In a variety of organisms, including mammals, RGN systems have been used for genome engineering by stimulating non-homologous end joining and homologous recombination, for example. The compositions and methods described herein are useful for modifying the forkhead box P3 (FOXP3) gene.

[0080] The RGN systems disclosed herein can bind, cleave, and/or modify target sequences in the FOXP3 gene. Modification of the FOXP3 gene can include reducing or eliminating expression of FoxP3. The guide RNAs of the disclosed RGN systems can be engineered to be shorter than their native lengths and still maintain editing efficiencies of >60%.

[0081] The ability to manipulate expression of Foxp3 would be desirable in controlling the function of a T cell to either encourage immune suppression in an inflammatory or autoimmune setting or to reduce immune suppression in a tumor microenvironment.

### II. Guide RNA

[0082] The present disclosure provides guide RNAs, components thereof, and polynucleotides encoding the same that target an associated RNA-guided nuclease (RGN) to a target nucleotide sequence in the FOXP3 gene. The term “guide RNA” is known in the art and generally refers to an RNA molecule (or a group of RNA molecules collectively) that can bind to an RNA-guided nuclease (RGN) and aid in targeting the RGN to a specific location within a target polynucleotide (e.g., a DNA or an mRNA molecule). The guide RNA can comprise a nucleotide sequence (i.e., a spacer) having sufficient complementarity with a target nucleotide sequence to hybridize with the target sequence and direct sequence-specific binding of an RGN to the target nucleotide sequence. In some embodiments, when the target nucleotide sequence is double-stranded as is the case with DNA, the target nucleotide sequence comprises a non-target strand (which comprises the PAM sequence) and the target strand, which hybridizes with the spacer of the guide RNA. In these embodiments, the guide RNA has sufficient complementarity with the target strand of a double-stranded target sequence (e.g., target DNA sequence of a FOXP3 gene) such that the guide RNA hybridizes with the target strand and directs sequence-specific binding of an associated RGN to the target sequence (e.g., target DNA sequence of a FOXP3 gene). Therefore, in some embodiments, a guide RNA includes a spacer that is identical to the sequence of the non-target strand except that uracil (U) replaces thymidine (T) in the guide RNA.

[0083] An RGN's respective guide RNA is one or more RNA molecules (generally, one or two), that can bind to the RGN and guide the RGN to bind to a particular target sequence, and in those embodiments wherein the RGN has nickase or nuclease activity, also cleave the target strand and/or the non-target strand. In general, a guide RNA comprises a CRISPR RNA (crRNA) and a trans-activating CRISPR RNA (tracrRNA).

[0084] The term “guide RNA” also encompasses, collectively, a group of two or more RNA molecules, where the crRNA and the tracrRNA are located in separate RNA molecules. Native guide RNAs that comprise both a crRNA and a tracrRNA generally comprise two separate RNA molecules that hybridize to each other through the repeat sequence of the crRNA and the anti-repeat sequence of the tracrRNA. In certain embodiments, the crRNA and tracrRNA are linked together by a multi-nucleotide linker (e.g., a four-nucleotide linker) to form a single guide RNA molecule, wherein the crRNA and the tracrRNA hybridize to each other through the repeat sequence of the crRNA and the anti-repeat sequence of the tracrRNA. Thus, a guide RNA encompasses a single-guide RNA (sgRNA), where the crRNA and the tracrRNA are located in the same RNA molecule or strand. A total length of a guide RNA refers to the length of the spacer and backbone in a sgRNA, or length of the crRNA and tracrRNA in a dgRNA.

[0085] A guide RNA of the disclosure can comprise at least one chemical modification. The at least one chemical modification includes: a bridged nucleic acid (BNA) modification; 2-O-methyl (2′-O-Me) modification; 2′-O-methoxy-ethyl (2′MOE) modification; 2′-fluoro (2′-F) modification; 2′F-4′Cα-OMe modification; 2′,4′-di-Cα-OMe modification; 2-O-methyl 3′phosphorothioate (MS) modification; 2-O-methyl 3′thiophosphonoacetate (MSP) modification; 2-O-methyl 3′phosphonoacetate (MP) modification; and phosphorothioate (PS) modification; or a combination thereof. In some embodiments, the BNA comprises a 2′,4′ BNA modification. In some embodiments, the 2′,4′ BNA modification is selected from the group consisting of: locked nucleic acid (LNA) modification, BNA^{NC}[N-Me]modification, 2′-O,4′-C-ethylene bridged nucleic acid (2′,4′-ENA) modification, and S-constrained ethyl (cEt) modification. In some embodiments, the 2′,4′ BNA is a LNA modification. In some embodiments, the 2′,4′ BNA is a cEt modification. In some embodiments, the at least one chemical modification comprises a BNA modification, 2′-O-Me modification, or PS modification. Chemical modifications of spacers, crRNA repeats, crRNAs, tracrRNAs, and guide RNAs are described in International application no. PCT/IB2023/058418, filed Aug. 25, 2023, which is hereby incorporated by reference in its entirety herein. The at least one chemical modification can comprise 2′-O-methyl 3′phosphorothioate (MS) modifications at the 3 terminal nucleotides at the 5′ region and at the 3 terminal nucleotides at the 3′ region of the guide RNA. As used herein, a “5′ region” of an RNA molecule disclosed herein includes the first nucleotide, the first 2 nucleotides, the first 3 nucleotides, the first 4 nucleotides, or the first 5 nucleotides of the 5′ end of the RNA molecule. As used herein, a “3′ region” of an RNA molecule disclosed herein includes the first nucleotide, the first 2 nucleotides, the first 3 nucleotides, the first 4 nucleotides, or the first 5 nucleotides of the 3′ end of the RNA molecule. In some embodiments, a 3′ region of a crRNA in the context of a single guide RNA includes the first nucleotide, the first 2 nucleotides, the first 3 nucleotides, the first 4 nucleotides, or the first 5 nucleotides from the tracrRNA or the linker that joins the crRNA and the tracrRNA of the single guide RNA.

[0086] As used herein, the term “crRNA” refers to an RNA molecule or portion thereof that includes a spacer, which is the nucleotide sequence that hybridizes with the target strand of a target sequence, and a CRISPR repeat (i.e. a crRNA repeat) that comprises a nucleotide sequence that forms a structure, either on its own or in concert with a hybridized tracrRNA, that is recognized by the RGN molecule. As used herein, the term “tracrRNA” or “transactivating crRNA” refers to an RNA molecule that comprises an anti-repeat sequence that has sufficient complementarity to hybridize to at least a portion of the CRISPR repeat of a crRNA to form a structure that is recognized by an RGN molecule. In some embodiments, additional secondary structure(s) (e.g., stem-loops) within the tracrRNA molecule is required for binding to an RGN.

[0087] The present invention provides CRISPR RNAs (crRNAs) or polynucleotides encoding CRISPR RNAs that target an associated RGN to a target sequence in the FOXP3 gene. A crRNA comprises a spacer and a CRISPR repeat. The “spacer” has a nucleotide sequence that directly hybridizes with the non-target strand of a target sequence (e.g., target DNA sequence in the FOXP3 gene) of interest. The spacer is engineered to have full or partial complementarity with the target strand of a target sequence of interest. In some embodiments, the spacer can comprise from about 8 nucleotides to about 30 nucleotides, or more. For example, the spacer can be about 8, about 9, about 10, about 11, about 12, about 13, about 14, about 15, about 16, about 17, about 18, about 19, about 20, about 21, about 22, about 23, about 24, about 25, about 26, about 27, about 28, about 29, about 30, or more nucleotides in length. In some embodiments, the spacer is 8, 9, 10, 11, 12, 13, 14, 15, 16, 17, 18, 19, 20, 21, 22, 23, 24, 25, 26, 27, 28, 29, 30, or more nucleotides in length. In some embodiments, the spacer is about 10 to about 26 nucleotides in length, or about 12 to about 30 nucleotides in length. In some embodiments, the spacer is about 30 nucleotides in length. In embodiments, the spacer is 30 nucleotides in length. In some embodiments, the degree of complementarity between a spacer and the target strand of a target sequence (e.g., target DNA sequence), when optimally aligned using a suitable alignment algorithm, is between 50% and 99% or more, including but not limited to about or more than about 50%, about 60%, about 70%, about 75%, about 80%, about 81%, about 82%, about 83%, about 84%, about 85%, about 86%, about 87%, about 88%, about 89%, about 90%, about 91%, about 92%, about 93%, about 94%, about 95%, about 96%, about 97%, about 98%, about 99%, or more. In embodiments, the degree of complementarity between a spacer and the target strand of a target sequence (e.g., target DNA sequence), when optimally aligned using a suitable alignment algorithm, is 50%, 60%, 70%, 75%, 80%, 81%, 82%, 83%, 84%, 85%, 86%, 87%, 88%, 89%, 90%, 91%, 92%, 93%, 94%, 95%, 96%, 97%, 98%, 99%, or more. The spacer can be identical in sequence to the non-target strand of a target sequence. In some of those embodiments wherein the target sequence is a target DNA sequence, the spacer can be identical in sequence to the non-target strand of the target DNA sequence, with the exception of the thymidines (Ts) in the target strand being replaced by uracils (Us) in the spacer. In some embodiments, the spacer is free of secondary structure, which can be predicted using any suitable polynucleotide folding algorithm known in the art, including but not limited to mFold (see, e.g., Zuker and Stiegler (1981) Nucleic Acids Res. 9:133-148) and RNAfold (see, e.g., Gruber et al. (2008) Cell 106(1):23-24). A spacer can comprise at least one chemical modification. In some embodiments, a spacer as part of a guide RNA comprises 2′-O-methyl 3′phosphorothioate (MS) modifications at the 3 terminal nucleotides at the 5′ region of the spacer.

[0088] The presently disclosed crRNAs comprise a spacer capable of targeting a bound RGN polypeptide to a target sequence in the forkhead box P3 (FOXP3) gene, wherein the target sequence has the nucleotide sequence set forth as any one of SEQ ID NOs: 2, 4, 6, 8, 10, 12, 14, 16, 18, 20, 22, 24, 26, 28, 30, 32, 34, 36, 38, 40, 42, 44, 46, 48, 50, 52, 54, 56, 58, 60, 62, 64, 66, 68, 70, 72, 74, 76, 78, 80, 82, 84, 86, 88, 90, 92, 94, 96, 98, 100, 102, 104, 106, 108, 110, 112, 114, 116, 118, 120, 122, 124, 126, 128, 130, 132, 134, 136, 138, 140, 142, 144, 146, 148, 150, 152, 154, 156, 158, 160, 162, 164, 166, 168, 170, 172, 174, 176, 178, 180, 182, 184, 186, 188, 190, 192, 194, 196, 198, 200, 202, 204, 206, 208, 210, 212, and 214. In some embodiments, a spacer of the disclosure has a nucleotide sequence set forth as any one of SEQ ID NOs: 1, 3, 5, 7, 9, 11, 13, 15, 17, 19, 21, 23, 25, 27, 29, 31, 33, 35, 37, 39, 41, 43, 45, 47, 49, 51, 53, 55, 57, 59, 61, 63, 65, 67, 69, 71, 73, 75, 77, 79, 81, 83, 85, 87, 89, 91, 93, 95, 97, 99, 101, 103, 105, 107, 109, 111, 113, 115, 117, 119, 121, 123, 125, 127, 129, 131, 133, 135, 137, 139, 141, 143, 145, 147, 149, 151, 153, 155, 157, 159, 161, 163, 165, 167, 169, 171, 173, 175, 177, 179, 181, 183, 185, 187, 189, 191, 193, 195, 197, 199, 201, 203, 205, 207, 209, 211, and 213 or a nucleotide sequence that differs in length and/or sequence from any one of SEQ ID NOs: 1, 3, 5, 7, 9, 11, 13, 15, 17, 19, 21, 23, 25, 27, 29, 31, 33, 35, 37, 39, 41, 43, 45, 47, 49, 51, 53, 55, 57, 59, 61, 63, 65, 67, 69, 71, 73, 75, 77, 79, 81, 83, 85, 87, 89, 91, 93, 95, 97, 99, 101, 103, 105, 107, 109, 111, 113, 115, 117, 119, 121, 123, 125, 127, 129, 131, 133, 135, 137, 139, 141, 143, 145, 147, 149, 151, 153, 155, 157, 159, 161, 163, 165, 167, 169, 171, 173, 175, 177, 179, 181, 183, 185, 187, 189, 191, 193, 195, 197, 199, 201, 203, 205, 207, 209, 211, and 213 by 1 to 5 nucleotides.

[0089] In some embodiments, the spacer has a nucleotide sequence that differs in length and/or sequence from any one of SEQ ID NOs: 1, 3, 5, 7, 9, 11, 13, 15, 17, 19, 21, 23, 25, 27, 29, 31, 33, 35, 37, 39, 41, 43, 45, 47, 49, 51, 53, 55, 57, 59, 61, 63, 65, 67, 69, 71, 73, 75, 77, 79, 81, 83, 85, 87, 89, 91, 93, 95, 97, 99, 101, 103, 105, 107, 109, 111, 113, 115, 117, 119, 121, 123, 125, 127, 129, 131, 133, 135, 137, 139, 141, 143, 145, 147, 149, 151, 153, 155, 157, 159, 161, 163, 165, 167, 169, 171, 173, 175, 177, 179, 181, 183, 185, 187, 189, 191, 193, 195, 197, 199, 201, 203, 205, 207, 209, 211, and 213 by 5 nucleotides.

[0090] In some embodiments, the spacer has a nucleotide sequence that differs in length and/or sequence from any one of SEQ ID NOs: 1, 3, 5, 7, 9, 11, 13, 15, 17, 19, 21, 23, 25, 27, 29, 31, 33, 35, 37, 39, 41, 43, 45, 47, 49, 51, 53, 55, 57, 59, 61, 63, 65, 67, 69, 71, 73, 75, 77, 79, 81, 83, 85, 87, 89, 91, 93, 95, 97, 99, 101, 103, 105, 107, 109, 111, 113, 115, 117, 119, 121, 123, 125, 127, 129, 131, 133, 135, 137, 139, 141, 143, 145, 147, 149, 151, 153, 155, 157, 159, 161, 163, 165, 167, 169, 171, 173, 175, 177, 179, 181, 183, 185, 187, 189, 191, 193, 195, 197, 199, 201, 203, 205, 207, 209, 211, and 213 by 4 nucleotides.

[0091] In some embodiments, the spacer has a nucleotide sequence that differs in length and/or sequence from any one of SEQ ID NOs: 1, 3, 5, 7, 9, 11, 13, 15, 17, 19, 21, 23, 25, 27, 29, 31, 33, 35, 37, 39, 41, 43, 45, 47, 49, 51, 53, 55, 57, 59, 61, 63, 65, 67, 69, 71, 73, 75, 77, 79, 81, 83, 85, 87, 89, 91, 93, 95, 97, 99, 101, 103, 105, 107, 109, 111, 113, 115, 117, 119, 121, 123, 125, 127, 129, 131, 133, 135, 137, 139, 141, 143, 145, 147, 149, 151, 153, 155, 157, 159, 161, 163, 165, 167, 169, 171, 173, 175, 177, 179, 181, 183, 185, 187, 189, 191, 193, 195, 197, 199, 201, 203, 205, 207, 209, 211, and 213 by 3 nucleotides.

[0092] In some embodiments, the spacer has a nucleotide sequence that differs in length and/or sequence from any one of SEQ ID NOs: 1, 3, 5, 7, 9, 11, 13, 15, 17, 19, 21, 23, 25, 27, 29, 31, 33, 35, 37, 39, 41, 43, 45, 47, 49, 51, 53, 55, 57, 59, 61, 63, 65, 67, 69, 71, 73, 75, 77, 79, 81, 83, 85, 87, 89, 91, 93, 95, 97, 99, 101, 103, 105, 107, 109, 111, 113, 115, 117, 119, 121, 123, 125, 127, 129, 131, 133, 135, 137, 139, 141, 143, 145, 147, 149, 151, 153, 155, 157, 159, 161, 163, 165, 167, 169, 171, 173, 175, 177, 179, 181, 183, 185, 187, 189, 191, 193, 195, 197, 199, 201, 203, 205, 207, 209, 211, and 213 by 2 nucleotides.

[0093] In some embodiments, the spacer has a nucleotide sequence that differs in length and/or sequence from any one of SEQ ID NOs: 1, 3, 5, 7, 9, 11, 13, 15, 17, 19, 21, 23, 25, 27, 29, 31, 33, 35, 37, 39, 41, 43, 45, 47, 49, 51, 53, 55, 57, 59, 61, 63, 65, 67, 69, 71, 73, 75, 77, 79, 81, 83, 85, 87, 89, 91, 93, 95, 97, 99, 101, 103, 105, 107, 109, 111, 113, 115, 117, 119, 121, 123, 125, 127, 129, 131, 133, 135, 137, 139, 141, 143, 145, 147, 149, 151, 153, 155, 157, 159, 161, 163, 165, 167, 169, 171, 173, 175, 177, 179, 181, 183, 185, 187, 189, 191, 193, 195, 197, 199, 201, 203, 205, 207, 209, 211, and 213 by 1 nucleotide.

[0094] In some embodiments, a spacer of the disclosure has a nucleotide sequence set forth as: UGCCAGGCCUGGGGUUGGGCAUC (SEQ ID NO: 155), or a nucleotide sequence that differs in length and/or sequence from SEQ ID NO: 155 by 1 to 5 nucleotides. In some embodiments, the spacer has a nucleotide sequence that differs in length and/or sequence from SEQ ID NO: 155 by 5 nucleotides. In some embodiments, the spacer has a nucleotide sequence that differs in length and/or sequence from SEQ ID NO: 155 by 4 nucleotides. In some embodiments, the spacer has a nucleotide sequence that differs in length and/or sequence from SEQ ID NO: 155 by 3 nucleotides. In some embodiments, the spacer has a nucleotide sequence that differs in length and/or sequence from SEQ ID NO: 155 by 2 nucleotides. In some embodiments, the spacer has a nucleotide sequence that differs in length and/or sequence from SEQ ID NO: 155 by 1 nucleotide.

[0095] In some embodiments, a spacer of the disclosure has a nucleotide sequence set forth as: CAGGUCUGAGGCUUUGGGUGCAG (SEQ ID NO: 163), or a nucleotide sequence that differs in length and/or sequence from SEQ ID NO: 163 by 1 to 5 nucleotides. In some embodiments, the spacer has a nucleotide sequence that differs in length and/or sequence from SEQ ID NO: 163 by 5 nucleotides. In some embodiments, the spacer has a nucleotide sequence that differs in length and/or sequence from SEQ ID NO: 163 by 4 nucleotides. In some embodiments, the spacer has a nucleotide sequence that differs in length and/or sequence from SEQ ID NO: 163 by 3 nucleotides. In some embodiments, the spacer has a nucleotide sequence that differs in length and/or sequence from SEQ ID NO: 163 by 2 nucleotides. In some embodiments, the spacer has a nucleotide sequence that differs in length and/or sequence from SEQ ID NO: 163 by 1 nucleotide.

[0096] In some embodiments, a spacer of the disclosure has a nucleotide sequence set forth as: UCGAAGAUCUCGGCCCUGGAAGG (SEQ ID NO: 179), or a nucleotide sequence that differs in length and/or sequence from SEQ ID NO: 179 by 1 to 5 nucleotides. In some embodiments, the spacer has a nucleotide sequence that differs in length and/or sequence from SEQ ID NO: 179 by 5 nucleotides. In some embodiments, the spacer has a nucleotide sequence that differs in length and/or sequence from SEQ ID NO: 179 by 4 nucleotides. In some embodiments, the spacer has a nucleotide sequence that differs in length and/or sequence from SEQ ID NO: 179 by 3 nucleotides. In some embodiments, the spacer has a nucleotide sequence that differs in length and/or sequence from SEQ ID NO: 179 by 2 nucleotides. In some embodiments, the spacer has a nucleotide sequence that differs in length and/or sequence from SEQ ID NO: 179 by 1 nucleotide.

[0097] In some embodiments, a spacer of the disclosure has a nucleotide sequence set forth as: UCUCGGCCCUGGAAGGUUCCCCCUG (SEQ ID NO: 189), or a nucleotide sequence that differs in length and/or sequence from SEQ ID NO: 189 by 1 to 5 nucleotides. In some embodiments, the spacer has a nucleotide sequence that differs in length and/or sequence from SEQ ID NO: 189 by 5 nucleotides. In some embodiments, the spacer has a nucleotide sequence that differs in length and/or sequence from SEQ ID NO: 189 by 4 nucleotides. In some embodiments, the spacer has a nucleotide sequence that differs in length and/or sequence from SEQ ID NO: 189 by 3 nucleotides. In some embodiments, the spacer has a nucleotide sequence that differs in length and/or sequence from SEQ ID NO: 189 by 2 nucleotides. In some embodiments, the spacer has a nucleotide sequence that differs in length and/or sequence from SEQ ID NO: 189 by 1 nucleotide.

[0098] In some embodiments, a spacer of the disclosure has a nucleotide sequence set forth as: GGUUCAAGGAAGAAGAGGAGGCA (SEQ ID NO: 197), or a nucleotide sequence that differs in length and/or sequence from SEQ ID NO: 197 by 1 to 5 nucleotides. In some embodiments, the spacer has a nucleotide sequence that differs in length and/or sequence from SEQ ID NO: 197 by 5 nucleotides. In some embodiments, the spacer has a nucleotide sequence that differs in length and/or sequence from SEQ ID NO: 197 by 4 nucleotides. In some embodiments, the spacer has a nucleotide sequence that differs in length and/or sequence from SEQ ID NO: 197 by 3 nucleotides. In some embodiments, the spacer has a nucleotide sequence that differs in length and/or sequence from SEQ ID NO: 197 by 2 nucleotides. In some embodiments, the spacer has a nucleotide sequence that differs in length and/or sequence from SEQ ID NO: 197 by 1 nucleotide.

[0099] In some embodiments, a spacer of the disclosure has a nucleotide sequence set forth as: GGGGUUCAAGGAAGAAGAGGAGGCA (SEQ ID NO: 193), or a nucleotide sequence that differs in length and/or sequence from SEQ ID NO: 193 by 1 to 5 nucleotides. In some embodiments, the spacer has a nucleotide sequence that differs in length and/or sequence from SEQ ID NO: 193 by 5 nucleotides. In some embodiments, the spacer has a nucleotide sequence that differs in length and/or sequence from SEQ ID NO: 193 by 4 nucleotides. In some embodiments, the spacer has a nucleotide sequence that differs in length and/or sequence from SEQ ID NO: 193 by 3 nucleotides. In some embodiments, the spacer has a nucleotide sequence that differs in length and/or sequence from SEQ ID NO: 193 by 2 nucleotides. In some embodiments, the spacer has a nucleotide sequence that differs in length and/or sequence from SEQ ID NO: 193 by 1 nucleotide.

[0100] Along with a spacer, crRNAs further comprise a CRISPR RNA repeat. The CRISPR RNA repeat comprises a nucleotide sequence that forms a structure, either on its own or in concert with a hybridized tracrRNA, that is recognized by the RGN molecule. In some embodiments, the CRISPR RNA repeat can comprise from about 8 nucleotides to about 30 nucleotides, or more. For example, the CRISPR repeat can be about 8, about 9, about 10, about 11, about 12, about 13, about 14, about 15, about 16, about 17, about 18, about 19, about 20, about 21, about 22, about 23, about 24, about 25, about 26, about 27, about 28, about 29, about 30, or more nucleotides in length. In some embodiments, the CRISPR repeat is 8, 9, 10, 11, 12, 13, 14, 15, 16, 17, 18, 19, 20, 21, 22, 23, 24, 25, 26, 27, 28, 29, 30, or more nucleotides in length. In some embodiments, the degree of complementarity between a CRISPR repeat and its corresponding tracrRNA antirepeat, when optimally aligned using a suitable alignment algorithm, is about or more than about 50%, about 60%, about 70%, about 75%, about 80%, about 81%, about 82%, about 83%, about 84%, about 85%, about 86%, about 87%, about 88%, about 89%, about 90%, about 91%, about 92%, about 93%, about 94%, about 95%, about 96%, about 97%, about 98%, about 99%, or more. In particular embodiments, the degree of complementarity between a CRISPR repeat and its corresponding tracrRNA antirepeat, when optimally aligned using a suitable alignment algorithm, is 50%, 60%, 70%, 75%, 80%, 81%, 82%, 83%, 84%, 85%, 86%, 87%, 88%, 89%, 90%, 91%, 92%, 93%, 94%, 95%, 96%, 97%, 98%, 99%, or more.

[0101] The CRISPR repeat can comprise the nucleotide sequence of any one of SEQ ID NOs: 546, 549-552, 839, 842, and 845, or an active variant or fragment thereof that when comprised within a guide RNA, is capable of directing the sequence-specific binding of an associated RNA-guided nuclease provided herein to a presently disclosed target DNA sequence within the FOXP3 gene. In some embodiments, an active CRISPR repeat variant comprises a nucleotide sequence having at least 40%, 45%, 50%, 55%, 60%, 65%, 70%, 75%, 80%, 85%, 90%, 91%, 92%, 93%, 94%, 95%, 96%, 97%, 98%, 99% or more sequence identity to a nucleotide sequence set forth as any one of SEQ ID NOs: 546, 549-552, 839, 842, and 845. In some embodiments, an active CRISPR repeat fragment comprises at least 5, 6, 7, 8, 9, 10, 11, 12, 13, 14, 15, 16, 17, 18, 19, 20, 21, or 22 contiguous nucleotides of a nucleotide sequence set forth as any one of SEQ ID NOs: 546, 549-552, 839, 842, and 845. In some embodiments, the CRISPR repeat comprises a nucleotide sequence that differs in length and/or sequence from SEQ ID NO: 546 by 1 to 8 nucleotides. In some embodiments, the CRISPR repeat comprises a nucleotide sequence that differs in length and/or sequence from SEQ ID NO: 546 by 8 nucleotides. In some embodiments, the CRISPR repeat comprises a nucleotide sequence that differs in length and/or sequence from SEQ ID NO: 546 by 7 nucleotides. In some embodiments, the CRISPR repeat comprises a nucleotide sequence that differs in length and/or sequence from SEQ ID NO: 546 by 6 nucleotides. In some embodiments, the CRISPR repeat comprises a nucleotide sequence that differs in length and/or sequence from SEQ ID NO: 546 by 5 nucleotides. In some embodiments, the CRISPR repeat comprises a nucleotide sequence that differs in length and/or sequence from SEQ ID NO: 546 by 4 nucleotides. In some embodiments, the CRISPR repeat comprises a nucleotide sequence that differs in length and/or sequence from SEQ ID NO: 546 by 3 nucleotides. In some embodiments, the CRISPR repeat comprises a nucleotide sequence that differs in length and/or sequence from SEQ ID NO: 546 by 2 nucleotides. In some embodiments, the CRISPR repeat comprises a nucleotide sequence that differs in length and/or sequence from SEQ ID NO: 546 by 1 nucleotide. In some embodiments, the CRISPR repeat comprises the nucleotide sequence set forth as: GUCAUAGUUCCAUUAAAGCCA (SEQ ID NO: 546). A CRISPR repeat can comprise at least one chemical modification. In some embodiments, a CRISPR repeat as part of a guide RNA comprises 2′-O-methyl 3′phosphorothioate (MS) modifications at the 3 terminal nucleotides at the 3′ region of the CRISPR repeat. CRISPR repeats comprising 2′-O-methyl 3′phosphorothioate (MS) modifications at the 3 terminal nucleotides at the 3′ region of the CRISPR repeat can have nucleotide sequences set forth as any one of SEQ ID NOs: 940, 942-945, 1228, 1230, and 1232.

[0102] The crRNA can be an engineered sequence that is not naturally occurring. In some embodiments, the specific CRISPR repeat is not linked to the engineered spacer in nature and the CRISPR repeat is considered heterologous to the spacer. In some embodiments, the spacer is an engineered sequence that is not naturally occurring.

[0103] In some embodiments, the crRNA has the sequence set forth as any one of SEQ ID NOs: 574-692. A crRNA can comprise at least one chemical modification. In some embodiments, a crRNA of the disclosure can comprise 2′-O-methyl 3′phosphorothioate (MS) modifications at the 3 terminal nucleotides at the 5′ region and at the 3 terminal nucleotides at the 3′ region of the crRNA. crRNAs comprising 2′-O-methyl 3′phosphorothioate (MS) modifications at the 3 terminal nucleotides at the 5′ region and at the 3 terminal nucleotides at the 3′ region of the crRNA can have nucleotide sequences set forth as any one of SEQ ID NOs: 967-1085.

[0104] Generally, the presently disclosed guide RNAs comprise a crRNA and a trans-activating CRISPR RNA (tracrRNA), while some presently disclosed compositions and methods utilize RGN polypeptides that do not require a tracrRNA. A tracrRNA molecule comprises a nucleotide sequence comprising a region, referred to herein as the anti-repeat, that has sufficient complementarity to hybridize to a crRNA repeat. In some embodiments, the tracrRNA molecule further comprises a region with secondary structure (e.g., stem-loop). In some embodiments, secondary structure includes nucleotides that are in one of two states, paired or unpaired, where nucleotide or base pairing includes base-base hydrogen bonding interactions (e.g., adenine (A) pairs with uracil (U), cytosine (C) pairs with guanine (G)) between two complementary nucleic acid strands to form a helix. In some embodiments, the combination of one or more helical elements interspersed with unpaired, single-stranded nucleotides constitutes an RNA structure.

[0105] A “stem loop” as used herein refers to a form of secondary structure comprising at least one “stem” and at least one “loop”, “bulge”, or “bubble” found in polynucleotides. A stem loop can form intramolecularly (within one molecule, e.g., within a tracrRNA or a sgRNA) or intermolecularly (between two distinct nucleic acids, e.g., in a dual guide RNA by the crRNA repeat of a crRNA and the anti-repeat of a tracrRNA). Stem loops are created when there is at least some complementarity between two nucleic acid sequences to form a paired double helix. The paired double helix region with full complementarity or sometimes including a G:U wobble base pair (or I:U, I:A, or I:C, where I refers to inosine) is referred to as a “stem”. The term “loop”, “bulge”, or “bubble” refers to a single stranded region within the “stem loop” structure where there is no complementarity between nucleotides, excluding G:U wobble base pairs (or I:U, I:A, or I:C, where I refers to inosine). Thus, “loops”, “bulges” and “bubbles” include nucleotides that are not paired. In some embodiments, a “loop” is distinguished from a “bulge” or “bubble” by being located at one end of the “stem loop” structure, while a “bulge” or a “bubble” is located between two “stems” in the “stem loop” structure.

[0106] In certain embodiments, a stem loop structure comprises a stem and a loop at one end of the stem. In some embodiments, a stem loop structure comprises a first stem and a second stem with a bubble in between the stems. In some embodiments, a stem loop structure comprises a loop, multiple stems and multiple bubbles in between the stems. In this circumstance, the bubbles in the order of closeness to the loop are referred to as a “first bubble”, a “second bubble”, a “third bubble”, etc., and the stems in the order of closeness to the loop are referred to as a “first stem”, a “second stem”, a “third stem”, etc. In embodiments of dgRNA, the stem loop formed by the crRNA repeat of a crRNA and the anti-repeat of a tracrRNA does not include a loop, and thus the bubbles in the order of closeness to the 5′ end of the tracrRNA (or 3′ end of the crRNA) are referred to as a “first bubble”, a “second bubble”, a “third bubble”, etc., and the stems in the order of closeness to the 5′ end of the tracrRNA (or 3′ end of the crRNA) are referred to as a “first stem”, a “second stem”, a “third stem”, etc.

[0107] The term “first stem of a crRNA repeat of a crRNA”, “first stem of a crRNA repeat”, or “first stem of a crRNA” means the region in the crRNA repeat of the crRNA that forms the first stem of a stem loop structure when hybridizing with an anti-repeat of a tracrRNA. The term “second stem of a crRNA repeat of a crRNA”, “second stem of a crRNA repeat”, or “second stem of a crRNA” means the region in the crRNA repeat of the crRNA that forms the second stem of a stem loop structure when hybridizing with an anti-repeat of a tracrRNA. Similarly, the term “first stem of an anti-repeat of a tracrRNA”, “first stem of an anti-repeat”, or “first stem of a tracrRNA” means the region in the anti-repeat of the tracrRNA that forms the first stem of a stem loop structure when hybridizing with a crRNA repeat of a crRNA. The term “second stem of an anti-repeat of a tracrRNA”, “second stem of an anti-repeat”, or “second stem of a tracrRNA” means the region in the anti-repeat of the tracrRNA that forms the second stem of a stem loop structure when hybridizing with a crRNA repeat of a crRNA.

[0108] In some embodiments, a stem loop formed intramolecularly is a hairpin stem loop. Base pairings occur in the stem part of a stem loop and typically involve guanine-cytosine base pairing and adenine-uracil(thymidine) base pairing, although guanine-uracil base pairing is possible. Base stacking interactions promote helix formation. The loop part of a stem loop includes bases that are not paired. In some embodiments, a loop is the point at which a nucleic acid strand turns back on itself for nucleotide pairing to create a stem. In some embodiments, loops that are less than three bases long are sterically impossible and do not form. In some embodiments, optimal loop length is about 4-8 bases long. Common loops with four nucleotide sequences such as GAAA, AAAG, ACUU, or UUCG are known as the “tetraloop” and are particularly stable due to the base-stacking interactions of its component nucleotides.

[0109] In some embodiments, the region of the tracrRNA that is fully or partially complementary to a crRNA repeat is at the 5′ end of the molecule and the 3′ end of the tracrRNA comprises secondary structure. This region of secondary structure generally comprises several hairpin structures, including the nexus hairpin, which is found adjacent to the anti-repeat. The nexus forms the core of the interactions between the guide RNA and the RGN, and is at the intersection between the guide RNA, the RGN, and the target sequence. The nexus hairpin often has a conserved nucleotide sequence in the base of the hairpin stem, with the motif UNANNC found in many nexus hairpins in tracrRNAs. In embodiments, guide RNAs or RGN systems of the disclosure use tracrRNAs that comprise non-canonical sequences in the base of the hairpin stem of their nexus hairpins, including UNANNG and CNANNC. In some embodiments, a guide RNA or an RGN system of the disclosure uses a tracrRNA that includes, in the base of the nexus hairpin stem, the non-canonical sequence of UNANNG. In some embodiments, a guide RNA or an RGN system of the disclosure uses a tracrRNA that includes, in the base of the nexus hairpin stem, the non-canonical sequence of CNANNC. There are often terminal hairpins at the 3′ end of the tracrRNA that can vary in structure and number, but often comprise a GC-rich Rho-independent transcriptional terminator hairpin followed by a string of U's at the 3′ end. See, for example, Briner et al. (2014) Molecular Cell 56:333-339, Briner and Barrangou (2016) Cold Spring Harb Protoc; doi: 10.1101/pdb.top090902, and U.S. Publication No. 2017/0275648, each of which is herein incorporated by reference in its entirety.

[0110] A tracrRNA of the disclosure can include a tail. The term “tail” as used herein refers to the non-complementary region closest to the 3′ end (e.g., within twelve, eleven, ten, nine, eight, seven, six, five nucleotides from the 3′ end) of a tracrRNA of the disclosure. In some embodiments, a tail of a tracrRNA includes 1-12, 1-8, 1-7, or 1-6 nucleotides from the 3′ end of the tracrRNA. In some embodiments, a tail of a tracrRNA includes 1, 2, 3, 4, 5, 6, 7, 8, 9, 10, 11, 12, or more nucleotides from the 3′ end of the tracrRNA.

[0111] A tracrRNA of the disclosure can include additional hairpin or stem loop structures in addition to the nexus hairpin. In some embodiments, a tracrRNA includes at least one stem loop. In some embodiments, a tracrRNA includes at least one stem loop proximal to the anti-repeat and at least one stem loop proximal to the 3′ end of the tracrRNA. “Proximal” refers to being within 1 nucleotide, 2 nucleotides, 3 nucleotides, 4 nucleotides, 5 nucleotides, 6 nucleotides, 7 nucleotides, 8 nucleotides, 9 nucleotides, or 10 nucleotides of a region or an end of a nucleic acid molecule. In certain embodiments, “proximal” refers to being within 1 nucleotide, 2 nucleotides, 3 nucleotides, 4 nucleotides, 5 nucleotides, or 6 nucleotides of a region or an end of a nucleic acid molecule. “Most proximal” refers to being the nearest to a region or to an end of a nucleic acid molecule. For example, a stem loop most proximal to the tail of a tracrRNA is the first stem loop nearest the tail of the tracrRNA. “Distal” refers to being at least 2 nucleotides, at least 3 nucleotides, at least 4 nucleotides, at least 5 nucleotides, at least 6 nucleotides, at least 7 nucleotides, at least 8 nucleotides, at least 9 nucleotides, at least 10 nucleotides, or more away from a region or an end of a nucleic acid molecule. In some embodiments, “distal” refers to being at least 2 nucleotides, at least 3 nucleotides, at least 4 nucleotides, at least 5 nucleotides, at least 6 nucleotides, at least 7 nucleotides, at least 8 nucleotides, at least 9 nucleotides, at least 10 nucleotides, or more away from a structure of a nucleic acid molecule (e.g., bubble, loop). For example, nucleotides of the first stem of the anti-repeat of a dual guide RNA distal to the first bubble of the stem loop is nearer to the 3′ terminal nucleotide of the crRNA and the 5′ terminal nucleotide of the tracrRNA than they are to the first bubble. A tracrRNA also forms secondary structure upon hybridizing with its corresponding crRNA. The anti-repeat region of a tracrRNA is fully or partially complementary to the crRNA repeat of a crRNA. In some embodiments, a portion of the anti-repeat of a tracrRNA and a portion of a crRNA repeat hybridize and form a stem. In some embodiments, the crRNA:tracrRNA stem includes at least one nucleotide pair (i.e. base pair) because these portions of the anti-repeat and crRNA repeat are complementary. As described elsewhere herein, a portion of the anti-repeat of a tracrRNA forming a first stem is the first stem of the anti-repeat, a portion of the anti-repeat of a tracrRNA forming a second stem is the second stem of the anti-repeat, a portion of the anti-repeat of a tracrRNA forming a third stem is the third stem of the anti-repeat, etc. As described elsewhere herein, a portion of the crRNA repeat of a crRNA forming a first stem is the first stem of the crRNA repeat, a portion of the crRNA repeat of a crRNA forming a second stem is the second stem of the crRNA repeat, a portion of the crRNA repeat of a crRNA forming a third stem is the third stem of the crRNA repeat, etc. In some embodiments, a portion of the anti-repeat of a tracrRNA and a portion of the crRNA repeat are not complementary with each other and thus do not hybridize to form base pairs. In some embodiments, the region of non-complementarity between the anti-repeat and the crRNA repeat forms a bulge or a bubble. In some embodiments, hybridization of the anti-repeat of a tracrRNA and the crRNA repeat of a crRNA forms a secondary structure that includes at least one stem. In some embodiments, hybridization of the anti-repeat of a tracrRNA and the crRNA repeat of a crRNA forms a secondary structure that includes at least one bubble. In some embodiments, hybridization of the anti-repeat of a tracrRNA and the crRNA repeat of a crRNA forms a secondary structure that includes at least one stem and at least one bubble. In some embodiments, hybridization of the anti-repeat of a tracrRNA and the crRNA repeat of a crRNA forms a secondary structure that includes two stems and one bubble in between.

[0112] In some embodiments, the anti-repeat of the tracrRNA that is fully or partially complementary to the CRISPR repeat comprises from about 8 nucleotides to about 30 nucleotides, or more. For example, the region of base pairing between the tracrRNA anti-repeat and the CRISPR repeat can be about 8, about 9, about 10, about 11, about 12, about 13, about 14, about 15, about 16, about 17, about 18, about 19, about 20, about 21, about 22, about 23, about 24, about 25, about 26, about 27, about 28, about 29, about 30, or more nucleotides in length. In some embodiments, the region of base pairing between the tracrRNA anti-repeat and the CRISPR repeat is 6, 7, 8, 9, 10, 11, 12, 13, 14, 15, 16, 17, 18, 19, 20, 21, 22, 23, 24, 25, 26, 27, 28, 29, 30, or more nucleotides in length. In some embodiments, the degree of complementarity between a CRISPR repeat and its corresponding tracrRNA anti-repeat, when optimally aligned using a suitable alignment algorithm, is about or more than about 50%, about 60%, about 70%, about 75%, about 80%, about 81%, about 82%, about 83%, about 84%, about 85%, about 86%, about 87%, about 88%, about 89%, about 90%, about 91%, about 92%, about 93%, about 94%, about 95%, about 96%, about 97%, about 98%, about 99%, or more. In some embodiments, the degree of complementarity between a CRISPR repeat and its corresponding tracrRNA anti-repeat, when optimally aligned using a suitable alignment algorithm, is 50%, 60%, 70%, 75%, 80%, 81%, 82%, 83%, 84%, 85%, 86%, 87%, 88%, 89%, 90%, 91%, 92%, 93%, 94%, 95%, 96%, 97%, 98%, 99%, or more.

[0113] In some embodiments, the entire tracrRNA can comprise from about 60 nucleotides to more than about 210 nucleotides. For example, the tracrRNA can be about 60, about 65, about 70, about 75, about 80, about 85, about 90, about 95, about 100, about 105, about 110, about 115, about 120, about 125, about 130, about 135, about 140, about 150, about 160, about 170, about 180, about 190, about 200, about 210, or more nucleotides in length. In some embodiments, the tracrRNA is 60, 65, 70, 75, 80, 85, 90, 95, 100, 105, 110, 115, 120, 125, 130, 135, 140, 150, 160, 170, 180, 190, 200, 210 or more nucleotides in length. In some embodiments, the tracrRNA is about 70 to about 105 nucleotides in length, including about 70, about 71, about 72, about 73, about 74, about 75, about 76, about 77, about 78, about 79, about 80, about 81, about 82, about 83, about 84, about 85, about 86, about 87, about 88, about 89, about 90, about 91, about 92, about 93, about 94, about 95, about 96, about 97, about 98, about 99, about 100, about 101, about 102, about 103, about 104, and about 105 nucleotides in length. In embodiments, the tracrRNA is 70 to 105 nucleotides in length, including 70, 71, 72, 73, 74, 75, 76, 77, 78, 79, 80, 81, 82, 83, 84, 85, 86, 87, 88, 89, 90, 91, 92, 93, 94, 95, 96, 97, 98, 99, 100, 101, 102, 103, 104, and 105 nucleotides in length.

[0114] In some embodiments, the tracrRNA comprises the nucleotide sequence set forth as any one of SEQ ID NOs: 547, 553-562, 840, 842, and 846, or an active variant or fragment thereof that when comprised within a guide RNA is capable of directing the sequence-specific binding of an associated RNA-guided nuclease provided herein to a presently disclosed target sequence within the FOXP3 gene. In some embodiments, an active tracrRNA sequence variant comprises a nucleotide sequence having at least 40%, 45%, 50%, 55%, 60%, 65%, 70%, 75%, 80%, 85%, 90%, 91%, 92%, 93%, 94%, 95%, 96%, 97%, 98%, 99% or more sequence identity to the nucleotide sequence set forth as any one of SEQ ID NOs: 547, 553-562, 840, 842, and 846. In some embodiments, an active tracrRNA sequence fragment comprises at least 5, 10, 15, 20, 25, 30, 35, 40, 45, 50, 55, 60, 65, 70, 75, 80, or more contiguous nucleotides of the nucleotide sequence set forth as any one of SEQ ID NOs: 547, 553-562, 840, 842, and 846. An active tracrRNA sequence fragment differs in length from SEQ ID NO: 547 by 1 to 16 nucleotides. In some embodiments, an active tracrRNA has a nucleotide sequence that is 8 nucleotides shorter than the nucleotide sequence set forth as SEQ ID NO: 547. In some embodiments, an active tracrRNA has a nucleotide sequence that is 11 nucleotides shorter than the nucleotide sequence set forth as SEQ ID NO: 547. An active tracrRNA sequence fragment can comprise the nucleotide sequence set forth as any one of SEQ ID NOs: 547, 553-562, 840, 842, and 846. In some embodiments, an active tracrRNA has at least 80% sequence identity, at least 90% sequence identity, or at least 95% sequence identity to a nucleotide sequence set forth as SEQ ID NO: 547. In some embodiments, an active tracrRNA has the nucleotide sequence set forth as:

(SEQ ID NO: 547)
UGGCUUUGAUGUUUCUAUGAUAAGGGUUUCGACCCGUGGCGUCGGGGAU
CGCCUGCCCAUUGAAAUGGGCUUCUCCCCAUUUAUU.

[0115] A tracrRNA can comprise at least one chemical modification. In some embodiments, a tracrRNA of the disclosure can comprise 2′-O-methyl 3′phosphorothioate (MS) modifications at the 3 terminal nucleotides at the 5′ end and at the 3 terminal nucleotides at the 3′ end of the tracrRNA. TracrRNAs comprising 2′-O-methyl 3′phosphorothioate (MS) modifications at the 3 terminal nucleotides at the 5′ end and at the 3 terminal nucleotides at the 3′ end of the tracrRNA can have nucleotide sequences set forth as any one of SEQ ID NOs: 941, 946-955, 1229, 1231, and 1233.

[0116] Two polynucleotide sequences can be considered to be substantially complementary when the two sequences hybridize to each other under stringent conditions. The term “hybridize” refers to one molecule binding or associating with another molecule, or regions of one molecule binding or associating with each other. A spacer of a guide RNA and its target sequence are considered to be substantially complementary when the two sequences hybridize to each other sufficiently to allow for the localization to the target sequence of an RGN bound to the guide RNA. Likewise, an RGN is considered to bind to a particular target sequence in a sequence-specific manner if the guide RNA bound to the RGN binds to a target sequence under normal experimental or in vivo conditions. The term “sequence specific” can also refer to the binding of a RGN polypeptide to a target sequence at a greater affinity than binding to a randomized background sequence.

[0117] The Tm is the temperature (under defined ionic strength and pH) at which 50% of a complementary target sequence hybridizes to a perfectly matched sequence. For DNA-DNA hybrids, the Tm can be approximated from the equation of Meinkoth and Wahl (1984) Anal. Biochem. 138:267-284: Tm=81.5° C.+16.6 (log M)+0.41 (% GC)−0.61 (% form)−500/L; where M is the molarity of monovalent cations, % GC is the percentage of guanosine and cytosine nucleotides in the DNA, % form is the percentage of formamide in the hybridization solution, and L is the length of the hybrid in base pairs. Generally, stringent conditions are selected to be about 5° C. lower than the thermal melting point (Tm) for the specific sequence and its complement at a defined ionic strength and pH. However, severely stringent conditions can utilize a hybridization and/or wash at 1, 2, 3, or 4° C. lower than the thermal melting point (Tm); moderately stringent conditions can utilize a hybridization and/or wash at 6, 7, 8, 9, or 10° C. lower than the thermal melting point (Tm); low stringency conditions can utilize a hybridization and/or wash at 11, 12, 13, 14, 15, or 20° C. lower than the thermal melting point (Tm). Using the equation, hybridization and wash compositions, and desired Tm, those of ordinary skill will understand that variations in the stringency of hybridization and/or wash solutions are inherently described. An extensive guide to the hybridization of nucleic acids is found in Tijssen (1993) Laboratory Techniques in Biochemistry and Molecular Biology—Hybridization with Nucleic Acid Probes, Part I, Chapter 2 (Elsevier, New York); and Ausubel et al., eds. (1995) Current Protocols in Molecular Biology, Chapter 2 (Greene Publishing and Wiley-Interscience, New York). See Sambrook et al. (1989) Molecular Cloning: A Laboratory Manual (2d ed., Cold Spring Harbor Laboratory Press, Plainview, New York).

[0118] The guide RNA can be a single guide RNA (sgRNA) or a dual-guide RNA (dgRNA). A single guide RNA comprises the crRNA and tracrRNA on a single molecule of RNA, whereas a dual-guide RNA system comprises a crRNA and a tracrRNA present on two distinct RNA molecules, hybridized to one another through at least a portion of the CRISPR repeat of the crRNA and at least a portion of the tracrRNA (i.e., the anti repeat), which may be fully or partially complementary to the CRISPR repeat of the crRNA. In embodiments wherein the guide RNA is a single guide RNA, the crRNA and tracrRNA are separated by a linker nucleotide sequence. In general, the linker nucleotide sequence is one that does not include complementary bases in order to avoid the formation of secondary structure within or comprising nucleotides of the linker nucleotide sequence. In some embodiments, the linker nucleotide sequence between the crRNA and tracrRNA is at least 3, at least 4, at least 5, at least 6, at least 7, at least 8, at least 9, at least 10, at least 11, at least 12, or more nucleotides in length. In some embodiments, the linker nucleotide sequence of a single guide RNA is at least 4 nucleotides in length. In certain embodiments, the linker nucleotide sequence of a single guide RNA is 4 nucleotides in length. In some embodiments, the linker nucleotide sequence includes a nucleotide sequence set forth as any of AAAG, GAAA, ACUU, and CAAAGG. In certain embodiments, the linker nucleotide sequence includes a nucleotide sequence set forth as AAAG. In some embodiments, the linker nucleotide sequence includes a nucleotide sequence set forth as GAAA.

[0119] In some embodiments, the linker nucleotide sequence includes a nucleotide sequence set forth as ACUU. In some embodiments, the linker nucleotide sequence includes a nucleotide sequence set forth as CAAAGG.

[0120] The single guide RNA or dual-guide RNA can be synthesized chemically or via in vitro transcription. Assays for determining sequence-specific binding between an RGN and a guide RNA are known in the art and include, but are not limited to, in vitro binding assays between an expressed RGN and the guide RNA, which can be tagged with a detectable label (e.g., biotin) and used in a pull-down detection assay in which the guide RNA:RGN complex is captured via the detectable label (e.g., with streptavidin beads). A control guide RNA with an unrelated sequence or structure to the guide RNA can be used as a negative control for non-specific binding of the RGN to RNA. In some embodiments, the guide RNA includes any one of SEQ ID NOs: 693-834.

[0121] In some embodiments, the guide RNA has at least 80% sequence identity, at least 90% sequence identity, or at least 95% sequence identity, to a nucleotide sequence set forth as SEQ ID NO: 693. In some embodiments, the guide RNA has the nucleotide sequence set forth as:

(SEQ ID NO: 693)
UGCCAGGCCUGGGGUUGGGCAUCGUCAUAGUUCCAUUAAAAAGUUGAUG
UUUCUAUGAUAAGGGUUUCGACCCGUGGCGUCGGGGAUCGCCUGCCCUU
GAAAGGGCUUCUCCCCAUU.

[0122] In some embodiments, the guide RNA has at least 80% sequence identity, at least 90% sequence identity, or at least 95% sequence identity, to a nucleotide sequence set forth as SEQ ID NO: 694. In some embodiments, the guide RNA has the nucleotide sequence set forth as:

(SEQ ID NO: 694)
CAGGUCUGAGGCUUUGGGUGCAGGUCAUAGUUCCAUUAAAAAGUUGAUG
UUUCUAUGAUAAGGGUUUCGACCCGUGGCGUCGGGGAUCGCCUGCCCUU
GAAAGGGCUUCUCCCCAUU.

[0123] In some embodiments, the guide RNA has at least 80% sequence identity, at least 90% sequence identity, or at least 95% sequence identity, to a nucleotide sequence set forth as SEQ ID NO: 695. In some embodiments, the guide RNA has the nucleotide sequence set forth as:

(SEQ ID NO: 695)
UCGAAGAUCUCGGCCCUGGAAGGGUCAUAGUUCCAUUAAAAAGUUGAUG
UUUCUAUGAUAAGGGUUUCGACCCGUGGCGUCGGGGAUCGCCUGCCCUU
GAAAGGGCUUCUCCCCAUU.

[0124] In some embodiments, the guide RNA has at least 80% sequence identity, at least 90% sequence identity, or at least 95% sequence identity, to a nucleotide sequence set forth as SEQ ID NO: 696. In some embodiments, the guide RNA has the nucleotide sequence set forth as:

(SEQ ID NO: 696)
UCUCGGCCCUGGAAGGUUCCCCCUGGUCAUAGUUCCAUAAAGAUGUUUC
UAUGAUAAGGGUUUCGACCCGUGGCGUCGGGGAUCGCCUGCCCAUUGAA
AUGGGCUUCUCCCCAUUUAUU.

[0125] In some embodiments, the guide RNA has at least 80% sequence identity, at least 90% sequence identity, or at least 95% sequence identity, to a nucleotide sequence set forth as SEQ ID NO: 697. In some embodiments, the guide RNA has the nucleotide sequence set forth as:

(SEQ ID NO: 697)
GGUUCAAGGAAGAAGAGGAGGCAGUCAUAGUUCCAUUAAAAAGUUGAUG
UUUCUAUGAUAAGGGUUUCGACCCGUGGCGUCGGGGAUCGCCUGCCCUU
GAAAGGGCUUCUCCCCAUU.

[0126] In some embodiments, the guide RNA has at least 80% sequence identity, at least 90% sequence identity, or at least 95% sequence identity, to a nucleotide sequence set forth as SEQ ID NO: 698. In some embodiments, the guide RNA has the nucleotide sequence set forth as:

(SEQ ID NO: 698)
GGGGUUCAAGGAAGAAGAGGAGGCAGUCAUAGUUCCAUAAAGAUGUUUC
UAUGAUAAGGGUUUCGACCCGUGGCGUCGGGGAUCGCCUGCCCAUUGAA
AUGGGCUUCUCCCCAUUUAUU.

[0127] A guide RNA of the disclosure can comprise at least one chemical modification. In a single guide RNA format, the at least one chemical modification can comprise 2′-O-methyl 3′phosphorothioate (MS) modifications at the 3 terminal nucleotides at the 5′ region and at the 3 terminal nucleotides at the 3′ region of the single guide RNA. In a dual guide RNA format, the at least one chemical modification can comprise 2′-O-methyl 3′phosphorothioate (MS) modifications at the 3 terminal nucleotides at the 5′ region and at the 3 terminal nucleotides at the 3′ region of the crRNA, and can comprise 2′-O-methyl 3′phosphorothioate (MS) modifications at the 3 terminal nucleotides at the 5′ region and/or at the 3 terminal nucleotides at the 3′ region of the tracrRNA. MS modified guide RNAs can have nucleotide sequences set forth as any one of SEQ ID NOs: 1086-1227.

[0128] The guide RNA can be introduced into a target cell or embryo as an RNA molecule. The guide RNA can be transcribed in vitro or chemically synthesized. In some embodiments, a nucleotide sequence encoding the guide RNA is introduced into the cell or embryo. In some embodiments, the nucleotide sequence encoding the guide RNA is operably linked to a promoter (e.g., an RNA polymerase III promoter). The promoter can be a native promoter or heterologous to the guide RNA-encoding nucleotide sequence.

[0129] In some embodiments, the guide RNA can be introduced into a target cell or embryo as a ribonucleoprotein complex, as described herein, wherein the guide RNA is bound to an RGN polypeptide.

[0130] The guide RNA directs an associated RGN to a particular target nucleotide sequence of interest through hybridization of the guide RNA to the target sequence of interest. The target sequence can be bound (and in some embodiments, cleaved) by an RNA-guided nuclease in vitro or in a cell. A target sequence can comprise DNA, RNA, or a combination of both and can be single-stranded or double-stranded. A target sequence can be genomic DNA (i.e., chromosomal DNA), plasmid DNA, or an RNA molecule (e.g., messenger RNA, ribosomal RNA, transfer RNA, micro RNA, small interfering RNA). In those embodiments wherein the target sequence is a chromosomal sequence, the chromosomal sequence can be a nuclear or mitochondrial chromosomal sequence. In the presently disclosed compositions and methods, the target sequence is within a target nucleic acid molecule that is double-stranded (e.g., a target DNA sequence). More specifically, the target sequence is within the FOXP3 gene. In some embodiments, the target sequence is unique in the target genome. In some embodiments, the target sequence comprises the nucleotide sequence set forth as any one of SEQ ID NOs: 2, 4, 6, 8, 10, 12, 14, 16, 18, 20, 22, 24, 26, 28, 30, 32, 34, 36, 38, 40, 42, 44, 46, 48, 50, 52, 54, 56, 58, 60, 62, 64, 66, 68, 70, 72, 74, 76, 78, 80, 82, 84, 86, 88, 90, 92, 94, 96, 98, 100, 102, 104, 106, 108, 110, 112, 114, 116, 118, 120, 122, 124, 126, 128, 130, 132, 134, 136, 138, 140, 142, 144, 146, 148, 150, 152, 154, 156, 158, 160, 162, 164, 166, 168, 170, 172, 174, 176, 178, 180, 182, 184, 186, 188, 190, 192, 194, 196, 198, 200, 202, 204, 206, 208, 210, 212, and 214.

[0131] The target sequence is adjacent to a protospacer adjacent motif (PAM) and the non-target strand of the target sequence is the strand that comprises the PAM. The PAM is immediately adjacent to the target sequence and often comprises Ns, where each “N” represents any nucleotide. In some embodiments, the PAM comprises about 1 to about 10 Ns, including about 1, about 2, about 3, about 4, about 5, about 6, about 7, about 8, about 9, or about 10 Ns. In certain embodiments, a PAM comprises 1 to 10 Ns, including 1, 2, 3, 4, 5, 6, 7, 8, 9, or 10 Ns. The PAM can be 5′ or 3′ of the target sequence on its non-target strand. In some embodiments, the PAM is 3′ of the target sequence on its non-target strand for the presently disclosed guide RNAs and RGN systems. Generally, the PAM is a consensus sequence of about 3-4 nucleotides, but in certain embodiments it can be 2, 3, 4, 5, 6, 7, 8, 9, or more nucleotides in length.

[0132] In some embodiments, a PAM sequence adjacent to a presently disclosed target sequence on its non-target strand comprises the consensus sequence set forth as any one of the PAM sequences in Table 1. In some embodiments, a PAM sequence adjacent to the presently disclosed target sequence on its non-target strand includes the sequence set forth as any one of CAACCCCA, AACCCCAG, TTGTCCAA, CAGGCCTG, GGGTCCTT, CAAGCCCT, ATGCCCAA, CCAACCCC, CATGCCAC, GCCACCAT, GGACCCGA, CCTTCCTT, TTGGCCCT, GGGGCCGA, CTCGCCCA, GCACCCAA, CCCTCCAG, CAGCCCTC, GGCCCCCA, GGGCCCCC, GGCCCCGG, AGGGCCGA, TCCCCCTG, TTCCCCCT, GTTCCCCC, GGTTCCCC, GGGGCCCA, CGGCCCTG, GGGCCCAT, TCGGCCCT, CATGCCTC, GCCTCCTC, TCTTCCTT, TGGCCC, CAGACC, TCGGCC, CTTGCC, GGCCCC, GCAGCC, AAGCCC, GCCTCC, GCCACC, ATCCCC, AAAGCC, CCATCC, CCTTCC, TGGGCC, GGGCCC, CGGGCC, AACCCC, TCGCCC, CATGCC, AGGGCC, TGAACC, CCCGCC, TCTTCC, and GGCTCC. In some embodiments, the PAM sequence is 3′ of the target sequence on its non-target strand.

[0133] It is well-known in the art that PAM sequence specificity for a given nuclease enzyme is affected by enzyme concentration (see, e.g., Karvelis et al. (2015) Genome Biol 16:253), which may be modified by altering the promoter used to express the RGN, or the amount of ribonucleoprotein complex delivered to the cell or embryo.

[0134] Upon recognizing its corresponding PAM sequence, the RGN can cleave one or both strands of a target sequence at a specific cleavage site. As used herein, a cleavage site is made up of the two particular nucleotides within a target sequence between which the target strand, non-target strand, or both strands of a target sequence are cleaved by an RGN. The cleavage site can comprise the 1^{st} and 2^{nd}, 2^{nd} and 3^{rd}, 3^{rd} and 4^{th}, 4^{th} and 5^{th}, 5^{th} and 6^{th}, 7^{th} and 8^{th}, 8^{th} and 9^{th} nucleotides from the PAM in either the 5′ or 3′ direction. In some embodiments, the cleavage site may be over 10, 11, 12, 13, 14, 15, 16, 17, 18, 19, or 20 nucleotides from the PAM in either the 5′ or 3′ direction. As RGNs can cleave a target sequence resulting in staggered ends, in certain embodiments, the cleavage site is defined based on the distance of the two nucleotides from the PAM on the non-target strand of the target sequence and, for the target strand, the distance of the two nucleotides from the complement of the PAM.

### III. Length Modifications to Guide RNA

[0135] The guide RNAs disclosed herein that are effective in targeting an associated RNA-guided nuclease (RGN) to a target nucleotide sequence in the FOXP3 gene can be engineered to be shorter than their corresponding native guide RNAs but have comparable efficiencies as their corresponding native guide RNAs in gene editing. A native guide RNA includes a guide RNA that is naturally occurring, for example, a guide RNA from an organism. A guide RNA that is engineered to be shorter than its native guide RNA length can be as effective as its non-engineered counterpart in its ability to bind an associated RGN and cleave and/or modify a target sequence.

[0136] A modification (e.g., deletion, truncation) “within” a region of a RNA molecule of the disclosure includes all nucleotides and phosphate backbone in that region, including the first and last nucleotide positions that are considered part of that region.

[0137] In some embodiments, a spacer, a crRNA repeat, a crRNA, an anti-repeat, a tracrRNA, a backbone, and/or a guide RNA of the present disclosure are engineered to be truncated or shortened. In some embodiments, a truncated spacer, truncated crRNA repeat, truncated crRNA, truncated anti-repeat, truncated tracrRNA, truncated backbone, and/or truncated guide RNA maintains or enhances gene editing efficiency as compared to the same spacer, crRNA repeat, crRNA, anti-repeat, tracrRNA, backbone, and/or guide RNA prior to its engineering. “Truncation” and “deletion” in the context of engineering a spacer, crRNA repeat, crRNA, anti-repeat, tracrRNA, backbone, or guide RNA, are used interchangeably herein and refer to removal of at least one nucleotide from a reference spacer, crRNA repeat, crRNA, anti-repeat, tracrRNA, backbone, or guide RNA, which might be naturally occurring or synthetic.

[0138] An engineered spacer can comprise a truncation of 1 nucleotide (nt), 2 nt, 3 nt, 4 nt, or 5 nt, as compared to the same spacer prior to its engineering. An engineered spacer can comprise a truncation of 1 nt, as compared to the spacer prior to its engineering. An engineered spacer can comprise a truncation of 2 nt, as compared to the spacer prior to its engineering. An engineered spacer can comprise a truncation of 3 nt, as compared to the spacer prior to its engineering. An engineered spacer can comprise a truncation of 4 nt, as compared to the spacer prior to its engineering. An engineered spacer can comprise a truncation of 5 nt, as compared to the spacer prior to its engineering. In some embodiments, a spacer of the disclosure has a nucleotide sequence set forth as any one of SEQ ID NOs: 1, 3, 5, 7, 9, 11, 13, 15, 17, 19, 21, 23, 25, 27, 29, 31, 33, 35, 37, 39, 41, 43, 45, 47, 49, 51, 53, 55, 57, 59, 61, 63, 65, 67, 69, 71, 73, 75, 77, 79, 81, 83, 85, 87, 89, 91, 93, 95, 97, 99, 101, 103, 105, 107, 109, 111, 113, 115, 117, 119, 121, 123, 125, 127, 129, 131, 133, 135, 137, 139, 141, 143, 145, 147, 149, 151, 153, 155, 157, 159, 161, 163, 165, 167, 169, 171, 173, 175, 177, 179, 181, 183, 185, 187, 189, 191, 193, 195, 197, 199, 201, 203, 205, 207, 209, 211, and 213. In some embodiments, a spacer as part of a guide RNA comprises 2′-O-methyl 3′phosphorothioate (MS) modifications at the 3 terminal nucleotides at the 5′ region of the spacer.

[0139] An engineered crRNA repeat can comprise a truncation of 1 nt, 2 nt, 3 nt, 4 nt, 5 nt, 6 nt, 7 nt, 8 nt, 9 nt, or 10 nt, as compared to the crRNA repeat prior to its engineering. An engineered crRNA repeat can comprise a truncation of 1 nt, 2 nt, 3 nt, 4 nt, 5 nt, 6 nt, 7 nt, 8 nt, 9 nt, or 10 nt from its 3′ terminus as compared to the nucleotide sequence set forth as SEQ ID NO: 546. In some embodiments, an engineered crRNA repeat comprises a truncation of 1 nt from its 3′ terminus as compared to the nucleotide sequence set forth as SEQ ID NO: 546. In some embodiments, an engineered crRNA repeat comprises a truncation of 2 nt from its 3′ terminus as compared to the nucleotide sequence set forth as SEQ ID NO: 546. In some embodiments, an engineered crRNA repeat comprises a truncation of 3 nt from its 3′ terminus as compared to the nucleotide sequence set forth as SEQ ID NO: 546. In some embodiments, an engineered crRNA repeat comprises a truncation of 4 nt from its 3′ terminus as compared to the nucleotide sequence set forth as SEQ ID NO: 546. In some embodiments, an engineered crRNA repeat comprises a truncation of 5 nt from its 3′ terminus as compared to the nucleotide sequence set forth as SEQ ID NO: 546. In some embodiments, an engineered crRNA repeat comprises a truncation of 6 nt from its 3′ terminus as compared to the nucleotide sequence set forth as SEQ ID NO: 546. In some embodiments, an engineered crRNA repeat comprises a truncation of 7 nt from its 3′ terminus as compared to the nucleotide sequence set forth as SEQ ID NO: 546. In some embodiments, an engineered crRNA repeat comprises a truncation of 8 nt from its 3′ terminus as compared to the nucleotide sequence set forth as SEQ ID NO: 546. In some embodiments, an engineered crRNA repeat comprises a truncation of 9 nt from its 3′ terminus as compared to the nucleotide sequence set forth as SEQ ID NO: 546. In some embodiments, an engineered crRNA repeat comprises a truncation of 10 nt from its 3′ terminus as compared to the nucleotide sequence set forth as SEQ ID NO: 546.

[0140] In some embodiments, an engineered crRNA repeat has the nucleotide sequence set forth as SEQ ID NO: 546 or that differs in length and/or sequence from SEQ ID NO: 546 by 1 to 8 nucleotides. In some embodiments, an engineered crRNA repeat has a nucleotide sequence that differs in length and/or sequence from SEQ ID NO: 546 by 8 nucleotides. In some embodiments, an engineered crRNA repeat has a nucleotide sequence that differs in length and/or sequence from SEQ ID NO: 546 by 7 nucleotides. In some embodiments, an engineered crRNA repeat has a nucleotide sequence that differs in length and/or sequence from SEQ ID NO: 546 by 6 nucleotides. In some embodiments, an engineered crRNA repeat has a nucleotide sequence that differs in length and/or sequence from SEQ ID NO: 546 by 5 nucleotides. In some embodiments, an engineered crRNA repeat has a nucleotide sequence that differs in length and/or sequence from SEQ ID NO: 546 by 4 nucleotides. In some embodiments, an engineered crRNA repeat has a nucleotide sequence that differs in length and/or sequence from SEQ ID NO: 546 by 3 nucleotides. In some embodiments, an engineered crRNA repeat has a nucleotide sequence that differs in length and/or sequence from SEQ ID NO: 546 by 2 nucleotides. In some embodiments, an engineered crRNA repeat has a nucleotide sequence that differs in length and/or sequence from SEQ ID NO: 546 by 1 nucleotide.

[0141] A crRNA repeat can comprise a total length of at least 10, 11, 12, 13, 14, 15, or 16 nucleotides. A crRNA repeat can comprise a total length of at most 10, 11, 12, 13, 14, 15, or 16 nucleotides. In some embodiments, a crRNA repeat can comprise a total length of 13 nucleotides. In some embodiments, a crRNA repeat can comprise a total length of 16 nucleotides. In some embodiments, a crRNA repeat has the nucleotide sequence set forth as any one of SEQ ID NOs: 546, 549-552, 839, 842, and 845. In some embodiments, a crRNA repeat as part of a guide RNA comprises 2′-O-methyl 3′phosphorothioate (MS) modifications at the 3 terminal nucleotides at the 3′ region of the crRNA repeat. MS modified crRNA repeats can have nucleotide sequences set forth as any of SEQ ID NOs: 940, 942-945, 1228, 1230, and 1232.

[0142] An engineered crRNA can comprise a truncation of 1 nt, 2 nt, 3 nt, 4 nt, 5 nt, 6 nt, 7 nt, 8 nt, 9 nt, 10 nt, 11 nt, 12 nt, 13 nt, 14 nt, or 15 nt as compared to the crRNA prior to its engineering. An engineered crRNA can comprise a truncation of 1 nt, 2 nt, 3 nt, 4 nt, or 5 nt from its 5′ terminus. In some embodiments, an engineered crRNA comprises a truncation of 1 nt from its 5′ terminus. In some embodiments, an engineered crRNA comprises a truncation of 2 nt from its 5′ terminus. In some embodiments, an engineered crRNA comprises a truncation of 3 nt from its 5′ terminus. An engineered crRNA can comprise a truncation of 1 nt, 2 nt, 3 nt, 4 nt, 5 nt, 6 nt, 7 nt, 8 nt, 9 nt, 10 nt, 11 nt, or 12 nt from its 3′ terminus. In some embodiments, an engineered crRNA comprises a truncation of 5 nt from its 3′ terminus. In some embodiments, an engineered crRNA comprises a truncation of 8 nt from its 3′ terminus.

[0143] A crRNA can have a nucleotide sequence having at least 80% sequence identity to any one of SEQ ID NOs: 574-692. In some embodiments, a crRNA has a nucleotide sequence having at least 90% sequence identity to any one of SEQ ID NOs: 574-692. In some embodiments, a crRNA has a nucleotide sequence having at least 95% sequence identity to any one of SEQ ID NOs: 574-692. In some embodiments, a crRNA has a nucleotide sequence having 100% sequence identity to any one of SEQ ID NOs: 574-692. A crRNA of the disclosure can comprise 2′-O-methyl 3′phosphorothioate (MS) modifications at the 3 terminal nucleotides at the 5′ region and at the 3 terminal nucleotides at the 3′ region of the crRNA. MS modified crRNAs can have nucleotide sequences set forth as any of SEQ ID NOs: 967-1085.

[0144] An engineered tracrRNA can comprises a truncation of 1 nt, 2 nt, 3 nt, 4 nt, 5 nt, 6 nt, 7 nt, 8 nt, 9 nt, 10 nt, 11 nt, 12 nt, 13 nt, 14 nt, 15 nt, 16 nt, or more, as compared to the same tracrRNA prior to its engineering. In some embodiments, an engineered tracrRNA comprises a deletion of 1 to 12 nucleotides within the first stem of the anti-repeat, as compared to the tracrRNA prior to its engineering. In some embodiments, an engineered tracrRNA comprises a deletion of 1 nt, 2 nt, 3 nt, 4 nt, 5 nt, 6 nt, 7 nt, 8 nt, 9 nt, 10 nt, 11 nt, or 12 nt within the first stem of the anti-repeat, as compared to the tracrRNA prior to its engineering. In some embodiments, an engineered tracrRNA comprises a deletion of 1 nt, 2 nt, 3 nt, 4 nt, 5 nt, 6 nt, 7 nt, 8 nt, or 9 nt within the first stem of the anti-repeat, as compared to the tracrRNA prior to its engineering.

[0145] An engineered tracrRNA can comprise a deletion of nucleotides from the tail, as compared to the tracrRNA prior to its engineering. In some embodiments, an engineered tracrRNA comprises a deletion of 1 to 6 nucleotides from the tail, as compared to the tracrRNA prior to its engineering. In some embodiments, an engineered tracrRNA comprises a deletion of 1 nucleotide, 2 nucleotides, 3 nucleotides, 4 nucleotides, 5 nucleotides, or 6 nucleotides from the tail, as compared to the tracrRNA prior to its engineering.

[0146] An engineered tracrRNA can comprise a deletion in a stem loop most proximal to the tail, as compared to the tracrRNA prior to its engineering. In some embodiments, an engineered tracrRNA comprises a deletion of 1 to 4 base pairs (bp), or 2 to 8 nt, within the first stem of the stem-loop most proximal to the tail of the tracrRNA, as compared to the tracrRNA prior to its engineering. In some embodiments, an engineered tracrRNA comprises a deletion of 1 to 3 bp, or 2 to 6 nt, within the first stem of the stem-loop most proximal to the tail of the tracrRNA, as compared to the tracrRNA prior to its engineering. In some embodiments, an engineered tracrRNA comprises a deletion of 1 bp (2 nt), 2 bp (4 nt), or 3 bp (6 nt) within the first stem of the stem-loop most proximal to the tail of the tracrRNA, as compared to the tracrRNA prior to its engineering.

[0147] As disclosed herein, a tracrRNA can comprise a total length of at least 65, 70, 75, 80, or 85 nucleotides. A tracrRNA can comprise comprises a total length of at most 65, 70, 75, 80, or 85 nucleotides. In some embodiments, a tracrRNA comprises a total length of 74 nucleotides. In some embodiments, a tracrRNA comprises a total length of 77 nucleotides.

[0148] A tail of a tracrRNA can comprise a total length of at least 1, 2, 3, 4, 5, 6, or 7 nucleotides. A tail of a tracrRNA can comprise a total length of at most 1, 2, 3, 4, 5, 6, or 7 nucleotides. In some embodiments, a tail of a tracrRNA comprises a total length of 3 nucleotides. In some embodiments, a tail of a tracrRNA comprises a total length of 1 nucleotide.

[0149] A tracrRNA can comprise a nucleotide sequence having at least 80% sequence identity to any one of SEQ ID NOs: 547, 553-562, 840, 842, and 846. In some embodiments, a tracrRNA has a nucleotide sequence having at least 90% sequence identity to any one of SEQ ID NOs: 547, 553-562, 840, 842, and 846. In some embodiments, a tracrRNA has a nucleotide sequence having at least 95% sequence identity to any one of SEQ ID NOs: 547, 553-562, 840, 842, and 846. In some embodiments, a tracrRNA has a nucleotide sequence having 100% sequence identity to any one of SEQ ID NOs: 547, 553-562, 840, 842, and 846. In some embodiments, a tracrRNA as part of a guide RNA comprises 2′-O-methyl 3′phosphorothioate (MS) modifications at the 3 terminal nucleotides at the 5′ region of the tracrRNA and at the 3 terminal nucleotides at the 3′ region of the tracrRNA. MS modified tracrRNAs can have nucleotide sequences set forth as any of SEQ ID NOs: 941, 946-955, 1229, 1231, and 1233.

[0150] A gRNA of the disclosure includes a sgRNA that comprises a backbone, wherein the backbone of the sgRNA comprises a crRNA repeat and a tracrRNA linked by a nucleotide linker. In some embodiments, the linker has a nucleotide sequence set forth as AAAG, GAAA, ACUU, or CAAAGG. In some embodiments, the linker has the nucleotide sequence set forth as AAAG.

[0151] Engineered sgRNA backbones disclosed herein can be 2 to 30 nucleotides shorter, as compared to the backbone prior to its engineering. An engineered sgRNA backbone can be 12 to 24 nucleotides shorter, as compared to the backbone prior to its engineering. In some embodiments, an engineered sgRNA backbone is 2 nucleotides, 4 nucleotides, 6 nucleotides, 8 nucleotides, 10 nucleotides, 12 nucleotides, 14 nucleotides, 16 nucleotides, 18 nucleotides, 20 nucleotides, 22 nucleotides, 24 nucleotides, 26 nucleotides, 28 nucleotides, 30 nucleotides, or more shorter, as compared to the backbone prior to its engineering.

[0152] An sgRNA backbone of the disclosure can comprise a total length of at least 85, 86, 87, 88, 89, 90, 91, 92, 93, 94, 95, 96, 97, 98, 99, 100, 101, 102, 103, 104, 105, 106, 107, 108, 109, 110, 111, 112, 113, 114, 115, 116, 117, 118, 119, or 120 nucleotides. An sgRNA backbone of the disclosure can comprise a total length of at most 85, 86, 87, 88, 89, 90, 91, 92, 93, 94, 95, 96, 97, 98, 99, 100, 101, 102, 103, 104, 105, 106, 107, 108, 109, 110, 111, 112, 113, 114, 115, 116, 117, 118, 119, or 120 nucleotides. In some embodiments, the sgRNA backbone comprises a total length of 86 to 98 nucleotides. In some embodiments, the sgRNA backbone comprises a total length of 94 nucleotides.

[0153] In some embodiments, a sgRNA has the nucleotide sequence set forth as any one of SEQ ID NOs: 693-834.

[0154] An sgRNA backbone of the disclosure can have a nucleotide sequence having at least 80% sequence identity to any one of SEQ ID NOs: 563-573. In some embodiments, an sgRNA backbone has a nucleotide sequence having at least 90% sequence identity to any one of SEQ ID NOs: 563-573. In some embodiments, an sgRNA backbone has a nucleotide sequence having at least 95% sequence identity to any one of SEQ ID NOs: 563-573. In some embodiments, an sgRNA backbone has a nucleotide sequence having 100% sequence identity to any one of SEQ ID NOs: 563-573. In some embodiments, a backbone as part of a guide RNA comprises 2′-O-methyl 3′phosphorothioate (MS) modifications at the 3 terminal nucleotides at the 3′ region of the backbone. MS modified backbones can have nucleotide sequences set forth as any of SEQ ID NOs: 956-966.

[0155] A gRNA of the disclosure includes a sgRNA that comprises a spacer and a backbone, wherein the backbone of the sgRNA comprises a crRNA repeat and a tracrRNA linked by a nucleotide linker. In some embodiments, an engineered sgRNA comprises a truncation in the spacer and/or a truncation in the backbone, as compared to the sgRNA prior to its engineering. In some embodiments, an engineered sgRNA comprises a truncation in the spacer, as compared to the sgRNA prior to its engineering. In some embodiments, an engineered sgRNA comprises a truncation in the backbone, as compared to the sgRNA prior to its engineering. In some embodiments, an engineered sgRNA comprises a truncation in the spacer and a truncation in the backbone, as compared to the sgRNA prior to its engineering. In embodiments where an engineered sgRNA comprises a truncation in the backbone, the truncation can be within the first stem of the stem loop formed by hybridization of the crRNA repeat and the anti-repeat, within the first stem of the stem loop most proximal to the tail, and/or within the tail of the tracrRNA.

[0156] An engineered sgRNA can comprise a deletion of 1 to 30 total nucleotides, as compared to the sgRNA prior to its engineering. In some embodiments, an engineered sgRNA comprises a deletion of 13 to 25 total nucleotides, as compared to the sgRNA prior to its engineering. In some embodiments, an engineered sgRNA comprises a deletion of 1 nucleotide, 2 nucleotides, 3 nucleotides, 4 nucleotides, 5 nucleotides, 6 nucleotides, 7 nucleotides, 8 nucleotides, 9 nucleotides, 10 nucleotides, 11 nucleotides, 12 nucleotides, 13 nucleotides, 14 nucleotides, 15 nucleotides, 16 nucleotides, 17 nucleotides, 18 nucleotides, 19 nucleotides, 20 nucleotides, 21 nucleotides, 22 nucleotides, 23 nucleotides, 24 nucleotides, 25 nucleotides, 26 nucleotides, 27 nucleotides, 28 nucleotides, 29 nucleotides, 30 total nucleotides, or more, as compared to the sgRNA prior to its engineering.

[0157] The first stem of a stem loop formed by hybridization of the crRNA repeat and the anti-repeat of a gRNA can comprise a total length of at least 3, 4, 5, 6, 7, 8, 9, 10, or 11 base pairs (bp), or at least 6, 8, 10, 12, 14, 16, 18, 20, or 22 nt. The first stem of a stem loop formed by hybridization of the crRNA repeat and the anti-repeat of a gRNA can comprise a total length of at most 3, 4, 5, 6, 7, 8, 9, 10, or 11 bp, or at most 6, 8, 10, 12, 14, 16, 18, 20, or 22 nt. In some embodiments, the first stem of a stem loop formed by hybridization of the crRNA repeat and the anti-repeat of a gRNA comprises a total length of 6 bp, or 12 nt. In some embodiments, the first stem of a stem loop formed by hybridization of the crRNA repeat and the anti-repeat of a gRNA comprises a total length of 3 bp, or 6 nt.

[0158] The first stem of the stem loop most proximal to the tail in a gRNA can comprise a total length of at least 1, 2, 3, 4, 5, or 6 bp, or at least 2, 4, 6, 8, 10, or 12 nt. The first stem of the stem loop most proximal to the tail in a gRNA can comprise a total length of at most 1, 2, 3, 4, 5, or 6 bp, or at most 2, 4, 6, 8, 10, or 12 nt. In some embodiments, the first stem of the stem loop most proximal to the tail in a gRNA comprises a total length of 5 bp, or 10 nt.

[0159] In some embodiments, a gRNA of the disclosure comprises the following: the first stem of the stem loop formed by hybridization of the crRNA repeat and the anti-repeat comprises a total length of 6 bp (12 nt), the tail of the tracrRNA comprises a total length of 3 nucleotides, and the first stem of the stem loop most proximal to the tail comprises a total length of 3 bp (6 nt). In some embodiments, a gRNA of the disclosure comprises a first stem of a stem loop formed by hybridization of the crRNA repeat and the anti-repeat comprising a total length of 13 bp (26 nt).

[0160] A total length of a guide RNA can refer to a total length of a sgRNA or of a dgRNA. A gRNA of the disclosure can comprise a total length of at least 85, 90, 95, 100, 105, 110, 115, 120, 125, 130, or 135 nucleotides. A gRNA of the disclosure can comprise a total length of at most 85, 90, 95, 100, 105, 110, 115, 120, 125, 130, or 135 nucleotides. In some embodiments, a gRNA of the disclosure comprises a total length of 106 to 135 nucleotides. In some embodiments, a gRNA of the disclosure comprises a total length of 117 to 119 nucleotides. In embodiments where the gRNA comprises a total length of 117 to 119 nucleotides, the gRNA is a sgRNA. In embodiments where a gRNA comprises a total length of 117 to 119 nucleotides as a sgRNA, the total length of the gRNA as a dgRNA can be 4 to 6 nucleotides fewer, or 111 to 115 nucleotides. In some embodiments, the total length of a gRNA as a dgRNA is 4 to 6 nucleotides fewer, or a number of nucleotides fewer that is equivalent to the length of the linker joining the crRNA and tracrRNA, as compared to the total length of the gRNA as a sgRNA. In some embodiments, a gRNA of the disclosure comprises a total length of 85, 86, 87, 88, 89, 90, 91, 92, 93, 94, 95, 96, 97, 98, 99, 100, 101, 102, 103, 104, 105, 106, 107, 108, 109, 110, 111, 112, 113, 114, 115, 116, 117, 118, 119, 120, 121, 122, 123, 124, 125, 126, 127, 128, 129, 130, 131, 132, 133, 134, 135 nucleotides, or more. In some embodiments, a sgRNA has the nucleotide sequence set forth as any one of SEQ ID NOs: 693-834.

[0161] In some embodiments, a sgRNA has at least 80% sequence identity, at least 90% sequence identity, or at least 95% sequence identity, to a nucleotide sequence set forth as SEQ ID NO: 693. In some embodiments, a sgRNA has the nucleotide sequence set forth as SEQ ID NO: 693. In some embodiments, a sgRNA has at least 80% sequence identity, at least 90% sequence identity, or at least 95% sequence identity, to a nucleotide sequence set forth as SEQ ID NO: 694. In some embodiments, a sgRNA has the nucleotide sequence set forth as SEQ ID NO: 694. In some embodiments, a sgRNA has at least 80% sequence identity, at least 90% sequence identity, or at least 95% sequence identity, to a nucleotide sequence set forth as SEQ ID NO: 695. In some embodiments, a sgRNA has the nucleotide sequence set forth as SEQ ID NO: 695. In some embodiments, a sgRNA has at least 80% sequence identity, at least 90% sequence identity, or at least 95% sequence identity, to a nucleotide sequence set forth as SEQ ID NO: 696. In some embodiments, a sgRNA has the nucleotide sequence set forth as SEQ ID NO: 696. In some embodiments, a sgRNA has at least 80% sequence identity, at least 90% sequence identity, or at least 95% sequence identity, to a nucleotide sequence set forth as SEQ ID NO: 697. In some embodiments, a sgRNA has the nucleotide sequence set forth as SEQ ID NO: 697. In some embodiments, a sgRNA has at least 80% sequence identity, at least 90% sequence identity, or at least 95% sequence identity, to a nucleotide sequence set forth as SEQ ID NO: 698. In some embodiments, a sgRNA has the nucleotide sequence set forth as SEQ ID NO: 698.

[0162] A sgRNA of the disclosure can comprise 2′-O-methyl 3′phosphorothioate (MS) modifications at the 3 terminal nucleotides at the 5′ region and at the 3 terminal nucleotides at the 3′ region of the sgRNA. MS modified sgRNAs can have nucleotide sequences set forth as any one of SEQ ID NOs: 1086-1227.

### IV. RNA-Guided Nucleases and Other Nucleases

[0163] Provided herein are RNA-guided nuclease systems comprising the presently disclosed guide RNAs targeting the FOXP3 gene. The term RNA-guided nuclease (RGN) refers to a polypeptide that binds to a particular target sequence (e.g., target DNA sequence) in a sequence-specific manner and is directed to the target sequence by a guide RNA molecule that is complexed with the polypeptide and hybridizes with the target strand of the target sequence (e.g., target DNA sequence). Active fragments or variants thereof of naturally-occurring RGNs maintain binding to a target nucleotide sequence in an RNA-guided sequence-specific manner. Although an RGN can be capable of cleaving the target sequence upon binding, the term RGN also encompasses nuclease-dead RGNs that are capable of binding to, but not cleaving, a target sequence. Cleavage of a target strand and/or non-target strand of a target sequence by an RGN can result in a single- or double-stranded break. RGNs only capable of cleaving a single strand of a double-stranded target nucleic acid molecule are referred to herein as nickases.

[0164] The presently disclosed RGN systems comprise an RGN that binds to a FOXP3 target sequence disclosed herein. In some embodiments, the RGN recognizes a PAM having a consensus nucleotide sequence including NNNNCC 3′ of the target sequence on its non-target strand (where N is A, C, T/U, or G; R is G or A), and active fragments or variants thereof. In some embodiments, the active fragment or variant of an RGN recognizing such PAM sequences is capable of binding and in some embodiments, cleaving or nicking a target sequence.

[0165] In some embodiments, an RGN, or an active variant or fragment thereof, capable of binding a target sequence adjacent to a PAM consensus sequence (i.e., capable of recognizing the PAM consensus sequence) set forth as NNNNCC is used in the presently disclosed compositions and methods. In some embodiments, an RGN, or an active variant or fragment thereof, capable of binding a target sequence adjacent to a full PAM sequence set forth as any one of CAACCCCA, AACCCCAG, TTGTCCAA, CAGGCCTG, GGGTCCTT, CAAGCCCT, ATGCCCAA, CCAACCCC, CATGCCAC, GCCACCAT, GGACCCGA, CCTTCCTT, TTGGCCCT, GGGGCCGA, CTCGCCCA, GCACCCAA, CCCTCCAG, CAGCCCTC, GGCCCCCA, GGGCCCCC, GGCCCCGG, AGGGCCGA, TCCCCCTG, TTCCCCCT, GTTCCCCC, GGTTCCCC, GGGGCCCA, CGGCCCTG, GGGCCCAT, TCGGCCCT, CATGCCTC, GCCTCCTC, TCTTCCTT, TGGCCC, CAGACC, TCGGCC, CTTGCC, GGCCCC, GCAGCC, AAGCCC, GCCTCC, GCCACC, ATCCCC, AAAGCC, CCATCC, CCTTCC, TGGGCC, GGGCCC, CGGGCC, AACCCC, TCGCCC, CATGCC, AGGGCC, TGAACC, CCCGCC, TCTTCC, and GGCTCC is used in the presently disclosed compositions and methods. In some embodiments, the PAM sequence is 3′ of the target sequence on its non-target strand. In some embodiments, the RGN binds to a guide RNA having a sequence set forth as any one of SEQ ID NOs: 693-834. In some embodiments, the RGN binds to a guide RNA having at least 80% sequence identity, at least 90% sequence identity, or at least 95% sequence identity to a nucleotide sequence set forth as SEQ ID NO: 693. In some embodiments, the RGN binds to a guide RNA having at least 80% sequence identity, at least 90% sequence identity, or at least 95% sequence identity to a nucleotide sequence set forth as SEQ ID NO: 694. In some embodiments, the RGN binds to a guide RNA having at least 80% sequence identity, at least 90% sequence identity, or at least 95% sequence identity to a nucleotide sequence set forth as SEQ ID NO: 695. In some embodiments, the RGN binds to a guide RNA having at least 80% sequence identity, at least 90% sequence identity, or at least 95% sequence identity to a nucleotide sequence set forth as SEQ ID NO: 696. In some embodiments, the RGN binds to a guide RNA having at least 80% sequence identity, at least 90% sequence identity, or at least 95% sequence identity to a nucleotide sequence set forth as SEQ ID NO: 697. In some embodiments, the RGN binds to a guide RNA having at least 80% sequence identity, at least 90% sequence identity, or at least 95% sequence identity to a nucleotide sequence set forth as SEQ ID NO: 698. In some embodiments, the RGN binds to a guide RNA having a sequence set forth as any one of SEQ ID NOs: 693, 694, 695, 696, 697, and 698. In some embodiments, the RGN binds to a guide RNA comprising a CRISPR repeat set forth as any one of SEQ ID NOs: 546, and 549-552, 839, 842, and 845, or an active variant or fragment thereof, and a tracrRNA set forth as any one of SEQ ID NOs: 547, 553-562, 840, 842, and 846, or an active variant or fragment thereof. In some embodiments, the RGN binds to a guide RNA comprising a CRISPR repeat having the nucleotide sequence set forth as SEQ ID NO: 546 or a nucleotide sequence that differs in length and/or sequence from SEQ ID NO: 546 by 1 to 8 nucleotides. In some embodiments, the RGN binds to a guide RNA comprising a tracrRNA having at least 80% sequence identity, at least 90% sequence identity, or at least 95% sequence identity to a nucleotide sequence set forth as SEQ ID NO: 547. In some embodiments, the RGN binds to a guide RNA comprising a tracrRNA having the nucleotide sequence set forth as SEQ ID NO: 547.

[0166] RGNs useful in the presently disclosed compositions and methods can be wild-type RGN sequences derived from bacterial or archaeal species. Alternatively, the RGNs can be variants or fragments of wild-type polypeptides. The wild-type RGN can be modified to alter nuclease activity or alter PAM specificity, for example. In some embodiments, the RGN is not naturally-occurring. RGN systems can be classified into Class 1 or Class 2. The Class 1 and 2 systems are subdivided into types (Types I, II, III, IV, V, VI), with some types further divided into subtypes (e.g., Type II-A, Type II-B, Type II-C, Type V-A, Type V-B). Class 2 systems comprise a single effector nuclease and include Types II, V, and VI.

[0167] In certain embodiments, the RGN is a naturally-occurring Type II CRISPR effector protein or an active variant or fragment thereof. As used herein, the term “Type II CRISPR-Cas protein,” “Type II CRISPR effector protein,” or “Type II RNA-guided nuclease” refers to an RGN that requires a trans-activating RNA (tracrRNA) and comprises two nuclease domains (i.e., RuvC and HNH), each of which is responsible for cleaving a single strand of a double-stranded DNA molecule. A representative type II RGN includes a Streptococcus pyogenes Cas9 protein, such as Cas9 (SpCas9 or SpyCas9) or a SpCas9 nickase, the sequences of which are set forth as SEQ ID NOs: 835 and 836, respectively, and are described in U.S. Pat. Nos. 10,000,772 and 8,697,359, each of which is herein incorporated by reference in its entirety. SpCas9 recognizes a NGG PAM sequence 3′ of a target sequence, and some of the disclosed FOXP3 target sequences could be targeted with an SpCas9 associated with its guide RNA, as indicated in Table 2 in the Examples. Another representative Cas9 ortholog that recognizes a NNNNCC PAM sequence 3′ of a target sequence includes a compact, high-accuracy Neisseria meningitidis Cas9 (Nme2Cas9), the sequence of which is set forth as SEQ ID NO: 837 and described in Edraki et al. Mol Cell. 2019 Feb. 21; 73(4):714-726.

[0168] Non-limiting examples of RGN systems useful in the presently disclosed compositions and methods along with corresponding crRNA sequences and tracrRNA sequences (if needed), are presented in Table 1 below and described further in Examples 1-3, and FIGS. 1-14 of the present specification. In certain embodiments, RGN systems of the disclosure comprise an RGN, or a nickase or nuclease-dead variant thereof, listed in Table 1. The guide RNA sequences (crRNA repeat and tracrRNA sequences) that can be used with each RGN of Table 1 are also provided, as well as the consensus PAM sequence (if known). In certain embodiments, an RGN of the disclosure comprises an active variant of an RGN (one able to bind to a nucleic acid molecule in an RNA-guided manner) listed in Table 1 having between 80% and 99% or more sequence identity to any one of the amino acid sequences listed in Table 1, including but not limited to about or more than about 80%, about 81%, about 82%, about 83%, about 84%, about 85%, about 86%, about 87%, about 88%, about 89%, about 90%, about 91%, about 92%, about 93%, about 94%, about 95%, about 96%, about 97%, about 98%, about 99%, or more. In certain embodiments, an RGN of the disclosure comprises an RGN having 80%, 81%, 82%, 83%, 84%, 85%, 86%, 87%, 88%, 89%, 90%, 91%, 92%, 93%, 94%, 95%, 96%, 97%, 98%, 99%, or more sequence identity to an RGN amino acid sequence disclosed in Table 1. In some embodiments, an RGN of the disclosure comprises a fragment of an RGN listed in Table 1 such as one that differs by as few as 1-15 amino acid residues, as few as 1-10, such as 6-10, as few as 5, as few as 4, as few as 3, as few as 2, or as few as 1 amino acid residue. In certain embodiments, the RGN comprises an N-terminal or a C-terminal truncation, which can comprise at least a deletion of 5, 10, 15, 20, 25, 30, 35, 40, 45, 50, 55, 60 amino acids or more from either the N or C terminus of the polypeptide. In some embodiments, the RGN comprises an internal deletion which can comprise at least a deletion of 1, 2, 3, 4, 5, 6, 7, 8, 9, 10, 11, 12, 13, 14, 15, 16, 17, 18, 19, 20, 25, 30, 35, 40, 45, 50, 55, 60 amino acids or more.

TABLE 1
Non-limiting examples of RNA-guided nucleases and corresponding crRNA repeat
sequences, tracrRNA sequences, and PAM sequences.

| | RGN SEQ | crRNA repeat | tracrRNA | PAM |
|---|---|---|---|---|
| RGN Name | ID NO: | SEQ ID NO: | SEQ ID NO: | sequence |
| APG07433.1 | 545 | 546 | 547 | NNNNCC |
| APG05083.1 | 838 | 839 | 840 | NNNNCC |
| APG07513.1 | 841 | 842 | 843 | NNNNCC |
| APG08290.1 | 844 | 845 | 846 | NNRNCC |
| APG05459.1 | 847 | 848 | 849 | NGG |
| APG01688.1 | 850 | 851 | 852 | NNRNNC |
| APG03128 | 853 | 854 | 855 | NNGGNNC |
| APG05733.1 | 856 | 857 | 858 | NNNNCC |
| APG01658.1 | 859 | 860 | 861 | NNGG |
| APG06498.1 | 862 | 863 | 864 | NNNNCC |
| APG06877.1 | 865 | 866 | 867 | NNNNCC |
| APG09053.1 | 868 | 869 | 870 | NGG |
| APG04293.1 | 871 | 872 | 873 | NNNNC |
| APG06646.1 | 874 | 875 | 876 | NNNNC |
| APG02874 | 877 | 878 | 879 | NNNNCC |
| APG03031 | 880 | 881 | 882 | NNNNCC |
| APG09208 | 883 | 884 | 885 | NNNNC |
| APG09344 | 886 | 887 | 888 | NAG |
| APG07991 | 889 | 890 | 891 | NGG |
| APG01868 | 892 | 893 | 894 | NGG |
| APG02998 | 895 | 896 | 897 | NGG |
| APG07433.1 deletion | 898 | 546 | 547 | NNNNCC |
| variant | | | | |
| APG08290.1 deletion | 899 | 845 | 846 | NNRNCC |
| variant | | | | |
| LPG10134 | 900 | 901 | 902 | NGG |
| LPG10136 | 903 | 904 | 905 | NNNNCC |
| LPG10138 | 906 | 907 | 908 | NNNNC |
| LPG10139 | 909 | 910 | 911 | NNNNC |
| LPG10141 | 912 | 913 | 914 | NGGNR |
| LPG10145 | 915 | 916 | 917 | NNGG |
| SpyCas9 | 835 | 918 | 919 | NGG |

N = A, C, T/U, or G; R = G or A

[0169] Non-limiting examples of RGNs useful in the presently disclosed methods and compositions include APG07433.1 RNA-guided nuclease, the amino acid sequence of which is set forth as: MRELDYRIGLDIGTNSIGWGVIELSWNKDRERYEKVRIVDQGVRMFDRAEMPKTGASLAEPR RIARSSRRRLNRKSQRKKNIRNLLVQHGVITQEELDSLYPLSKKSMDIWGIRLDGLDRLLNHF EWARLLIHLAQRRGFKSNRKSELKDTETGKVLSSIQLNEKRLSLYRTVGEMWMKDPDFSKY DRKRNSPNEYVFSVSRAELEKEIVTLFAAQRRFQSPYASKDLQETYLQIWTHQLPFASGNAIL NKVGYCSLLKGKERRIPKATYTFQYFSALDQVNRTRLGPDFQPFTKEQREIILNNMFQRTDYY KKKTIPEVTYYDIRKWLELDETIQFKGLNYDPNEELKKIEKKPFINLKAFYEINKVVANYSERT NETFSTLDYDGIGYALTVYKTDKDIRSYLKSSHNLPKRCYDDQLIEELLSLSYTKFGHLSLKAI NHVLSIMQKGNTYKEAVDQLGYDTSGLKKEKRSKFLPPISDEITNPIVKRALTQARKVVNAII RRHGSPHSVHIELARELSKNHDERTKIVSAQDENYKKNKGAISILSEHGILNPTGYDIVRYKL WKEQGERCAYSLKEIPADTFFNELKKERNGAPILEVDHILPYSQSFIDSYHNKVLVYSDENRK KGNRIPYTYFLETNKDWEAFERYVRSNKFFSKKKREYLLKRAYLPRESELIKERHLNDTRYA STFLKNFIEQNLQFKEAEDNPRKRRVQTVNGVITAHFRKRWGLEKDRQETYLHHAMDAIIVA CTDHHMVTRVTEYYQIKESNKSVKKPYFPMPWEGFRDELLSHLASQPIAKKISEELKAGYQS LDYIFVSRMPKRSITGAAHKQTIMRKGGIDKKGKTIIIERLHLKDIKFDENGDFKMVGKEQDM ATYEAIKQRYLEHGKNSKKAFETPLYKPSKKGTGNLIKRVKVEGQAKSFVREVNGGVAQNG DLVRVDLFEKDDKYYMVPIYVPDTVCSELPKKVVASSKGYEQWLTLDNSFTFKFSLYPYDL VRLVKGDEDRFLYFGTLDIDSDRLNFKDVNKPSKKNEYRYSLKTIEDLEKYEVGVLGDLRLV RKETRRNFH (SEQ ID NO: 545), and active fragments or variants thereof that retain the ability to bind to a target sequence in an RNA-guided sequence-specific manner. In some embodiments, an active variant of an RGN disclosed herein comprises an amino acid sequence having at least 40%, 45%, 50%, 55%, 60%, 65%, 70%, 75%, 80%, 85%, 90%, 91%, 92%, 93%, 94%, 95%, 96%, 97%, 98%, 99% or more sequence identity to the amino acid sequence set forth as SEQ ID NO: 545. In some embodiments, an active fragment of the APG07433.1 RGN comprises at least 50, 100, 150, 200, 250, 300, 350, 400, 450, 500, 550, 600, 650, 700, 750, 800, 850, 900, 950, 1000, 1050 or more contiguous amino acid residues of the amino acid sequence set forth as SEQ ID NO: 545.

[0170] In some embodiments, the presently disclosed compositions and methods comprise an RGN capable of binding a target sequence of the disclosure or an RGN having an amino acid sequence set forth as SEQ ID NO: 545, or an active variant or fragment thereof, wherein the RGN is capable of binding a target sequence adjacent to a PAM consensus sequence set forth as NNNNCC. In some embodiments, the PAM sequence is 3′ of the target sequence on its non-target strand. In some embodiments, the RGN binds to a guide RNA having a sequence set forth as any one of SEQ ID NOs: 693-834, and 1086-1227. In some embodiments, the RGN binds to a guide RNA comprising a CRISPR repeat set forth as any one of SEQ ID NOs: 546, 549-552, 839, 842, 845, 940, 942-945, 1228, 1230, and 1232, or an active variant or fragment thereof, and a tracrRNA set forth as any one of SEQ ID NOs: 547, 553-562, 840, 842, 846, 941, 946-955, 1229, 1231, and 1233, or an active variant or fragment thereof.

[0171] In some embodiments, the presently disclosed compositions and methods comprise an RGN capable of binding a target sequence of the disclosure or an RGN having an amino acid sequence set forth as SEQ ID NO: 545, or an active variant or fragment thereof, wherein the RGN is capable of binding a target sequence adjacent to a full PAM sequence set forth as any one of CAACCCCA, AACCCCAG, TTGTCCAA, CAGGCCTG, GGGTCCTT, CAAGCCCT, ATGCCCAA, CCAACCCC, CATGCCAC, GCCACCAT, GGACCCGA, CCTTCCTT, TTGGCCCT, GGGGCCGA, CTCGCCCA, GCACCCAA, CCCTCCAG, CAGCCCTC, GGCCCCCA, GGGCCCCC, GGCCCCGG, AGGGCCGA, TCCCCCTG, TTCCCCCT, GTTCCCCC, GGTTCCCC, GGGGCCCA, CGGCCCTG, GGGCCCAT, TCGGCCCT, CATGCCTC, GCCTCCTC, TCTTCCTT, TGGCCC, CAGACC, TCGGCC, CTTGCC, GGCCCC, GCAGCC, AAGCCC, GCCTCC, GCCACC, ATCCCC, AAAGCC, CCATCC, CCTTCC, TGGGCC, GGGCCC, CGGGCC, AACCCC, TCGCCC, CATGCC, AGGGCC, TGAACC, CCCGCC, TCTTCC, and GGCTCC. In some embodiments, the PAM sequence is 3′ of the target sequence on its non-target strand. In some embodiments, the RGN binds to a guide RNA having a sequence set forth as any one of SEQ ID NOs: 693-834, and 1086-1227. In some embodiments, the RGN binds to a guide RNA having at least 80% sequence identity, at least 90% sequence identity, or at least 95% sequence identity to a nucleotide sequence set forth as SEQ ID NO: 693. In some embodiments, the RGN binds to a guide RNA having at least 80% sequence identity, at least 90% sequence identity, or at least 95% sequence identity to a nucleotide sequence set forth as SEQ ID NO: 694. In some embodiments, the RGN binds to a guide RNA having at least 80% sequence identity, at least 90% sequence identity, or at least 95% sequence identity to a nucleotide sequence set forth as SEQ ID NO: 695. In some embodiments, the RGN binds to a guide RNA having at least 80% sequence identity, at least 90% sequence identity, or at least 95% sequence identity to a nucleotide sequence set forth as SEQ ID NO: 696. In some embodiments, the RGN binds to a guide RNA having at least 80% sequence identity, at least 90% sequence identity, or at least 95% sequence identity to a nucleotide sequence set forth as SEQ ID NO: 697. In some embodiments, the RGN binds to a guide RNA having at least 80% sequence identity, at least 90% sequence identity, or at least 95% sequence identity to a nucleotide sequence set forth as SEQ ID NO: 698. In some embodiments, the RGN binds to a guide RNA having a sequence set forth as any one of SEQ ID NOs: 693, 694, 695, 696, 697, and 698. In some embodiments, the RGN binds to a guide RNA comprising a CRISPR repeat set forth as any one of SEQ ID NOs: 546, 549-552, 839, 842, 845, 940, 942-945, 1228, 1230, and 1232, or an active variant or fragment thereof, and a tracrRNA set forth as any one of SEQ ID NOs: 547, 553-562, 840, 842, 846, 941, 946-955, 1229, 1231, and 1233, or an active variant or fragment thereof. In some embodiments, the RGN binds to a guide RNA comprising a CRISPR repeat set forth as SEQ ID NO: 546, or an active variant or fragment thereof. In some embodiments, the RGN binds to a guide RNA comprising a tracrRNA set forth as SEQ ID NO: 547, or an active variant or fragment thereof.

[0172] RGNs useful in the presently disclosed methods and compositions include APG05083.1 RNA-guided nuclease, the amino acid sequence of which is set forth as SEQ ID NO: 838, and active fragments or variants thereof that retain the ability to bind to a target sequence in an RNA-guided sequence-specific manner. In some embodiments, an active variant of an RGN disclosed herein comprises an amino acid sequence having at least 40%, 45%, 50%, 55%, 60%, 65%, 70%, 75%, 80%, 85%, 90%, 91%, 92%, 93%, 94%, 95%, 96%, 97%, 98%, 99% or more sequence identity to the amino acid sequence set forth as SEQ ID NO: 838. In some embodiments, an active fragment of the APG05083.1 RGN comprises at least 50, 100, 150, 200, 250, 300, 350, 400, 450, 500, 550, 600, 650, 700, 750, 800, 850, 900, 950, 1000, 1050 or more contiguous amino acid residues of the amino acid sequence set forth as SEQ ID NO: 838.

[0173] In some embodiments, the presently disclosed compositions and methods comprise an RGN capable of binding a target sequence of the disclosure or an RGN having an amino acid sequence set forth as SEQ ID NO: 838, or an active variant or fragment thereof, wherein the RGN is capable of binding a target sequence adjacent to a PAM consensus sequence set forth as NNNNCC. In some embodiments, the PAM sequence is 3′ of the target sequence on its non-target strand. In some embodiments, the RGN binds to a guide RNA having a sequence set forth as any one of SEQ ID NOs: 693-834, and 1086-1227. In some embodiments, the RGN binds to a guide RNA comprising a CRISPR repeat set forth as any one of SEQ ID NOs: 546, 549-552, 839, 842, 845, 940, 942-945, 1228, 1230, and 1232, or an active variant or fragment thereof, and a tracrRNA set forth as any one of SEQ ID NOs: 547, 553-562, 840, 842, 846, 941, 946-955, 1229, 1231, and 1233, or an active variant or fragment thereof.

[0174] In some embodiments, the presently disclosed compositions and methods comprise an RGN capable of binding a target sequence of the disclosure or an RGN having an amino acid sequence set forth as SEQ ID NO: 838, or an active variant or fragment thereof, wherein the RGN is capable of binding a target sequence adjacent to a full PAM sequence set forth as any one of CAACCCCA, AACCCCAG, TTGTCCAA, CAGGCCTG, GGGTCCTT, CAAGCCCT, ATGCCCAA, CCAACCCC, CATGCCAC, GCCACCAT, GGACCCGA, CCTTCCTT, TTGGCCCT, GGGGCCGA, CTCGCCCA, GCACCCAA, CCCTCCAG, CAGCCCTC, GGCCCCCA, GGGCCCCC, GGCCCCGG, AGGGCCGA, TCCCCCTG, TTCCCCCT, GTTCCCCC, GGTTCCCC, GGGGCCCA, CGGCCCTG, GGGCCCAT, TCGGCCCT, CATGCCTC, GCCTCCTC, TCTTCCTT, TGGCCC, CAGACC, TCGGCC, CTTGCC, GGCCCC, GCAGCC, AAGCCC, GCCTCC, GCCACC, ATCCCC, AAAGCC, CCATCC, CCTTCC, TGGGCC, GGGCCC, CGGGCC, AACCCC, TCGCCC, CATGCC, AGGGCC, TGAACC, CCCGCC, TCTTCC, and GGCTCC. In some embodiments, the PAM sequence is 3′ of the target sequence on its non-target strand. In some embodiments, the RGN binds to a guide RNA having a sequence set forth as any one of SEQ ID NOs: 693-834, and 1086-1227. In some embodiments, the RGN binds to a guide RNA comprising a CRISPR repeat set forth as any one of SEQ ID NOs: 546, 549-552, 839, 842, 845, 940, 942-945, 1228, 1230, and 1232, or an active variant or fragment thereof, and a tracrRNA set forth as any one of SEQ ID NOs: 547, 553-562, 840, 842, 846, 941, 946-955, 1229, 1231, and 1233, or an active variant or fragment thereof.

[0175] RGNs useful in the presently disclosed methods and compositions include APG07513.1 RNA-guided nuclease, the amino acid sequence of which is set forth as SEQ ID NO: 841, and active fragments or variants thereof that retain the ability to bind to a target sequence in an RNA-guided sequence-specific manner. In some embodiments, an active variant of an RGN disclosed herein comprises an amino acid sequence having at least 40%, 45%, 50%, 55%, 60%, 65%, 70%, 75%, 80%, 85%, 90%, 91%, 92%, 93%, 94%, 95%, 96%, 97%, 98%, 99% or more sequence identity to the amino acid sequence set forth as SEQ ID NO: 841. In some embodiments, an active fragment of the APG07513.1 RGN comprises at least 50, 100, 150, 200, 250, 300, 350, 400, 450, 500, 550, 600, 650, 700, 750, 800, 850, 900, 950, 1000, 1050 or more contiguous amino acid residues of the amino acid sequence set forth as SEQ ID NO: 841.

[0176] In some embodiments, the presently disclosed compositions and methods comprise an RGN capable of binding a target sequence of the disclosure or an RGN having an amino acid sequence set forth as SEQ ID NO: 841, or an active variant or fragment thereof, wherein the RGN is capable of binding a target sequence adjacent to a PAM consensus sequence set forth as NNNNCC. In some embodiments, the PAM sequence is 3′ of the target sequence on its non-target strand. In some embodiments, the RGN binds to a guide RNA having a sequence set forth as any one of SEQ ID NOs: 693-834, and 1086-1227. In some embodiments, the RGN binds to a guide RNA comprising a CRISPR repeat set forth as any one of SEQ ID NOs: 546, 549-552, 839, 842, 845, 940, 942-945, 1228, 1230, and 1232, or an active variant or fragment thereof, and a tracrRNA set forth as any one of SEQ ID NOs: 547, 553-562, 840, 842, 846, 941, 946-955, 1229, 1231, and 1233, or an active variant or fragment thereof.

[0177] In some embodiments, the presently disclosed compositions and methods comprise an RGN capable of binding a target sequence of the disclosure or an RGN having an amino acid sequence set forth as SEQ ID NO: 841, or an active variant or fragment thereof, wherein the RGN is capable of binding a target sequence adjacent to a full PAM sequence set forth as any one of CAACCCCA, AACCCCAG, TTGTCCAA, CAGGCCTG, GGGTCCTT, CAAGCCCT, ATGCCCAA, CCAACCCC, CATGCCAC, GCCACCAT, GGACCCGA, CCTTCCTT, TTGGCCCT, GGGGCCGA, CTCGCCCA, GCACCCAA, CCCTCCAG, CAGCCCTC, GGCCCCCA, GGGCCCCC, GGCCCCGG, AGGGCCGA, TCCCCCTG, TTCCCCCT, GTTCCCCC, GGTTCCCC, GGGGCCCA, CGGCCCTG, GGGCCCAT, TCGGCCCT, CATGCCTC, GCCTCCTC, TCTTCCTT, TGGCCC, CAGACC, TCGGCC, CTTGCC, GGCCCC, GCAGCC, AAGCCC, GCCTCC, GCCACC, ATCCCC, AAAGCC, CCATCC, CCTTCC, TGGGCC, GGGCCC, CGGGCC, AACCCC, TCGCCC, CATGCC, AGGGCC, TGAACC, CCCGCC, TCTTCC, and GGCTCC. In some embodiments, the PAM sequence is 3′ of the target sequence on its non-target strand. In some embodiments, the RGN binds to a guide RNA having a sequence set forth as any one of SEQ ID NOs: 693-834, and 1086-1227. In some embodiments, the RGN binds to a guide RNA comprising a CRISPR repeat set forth as any one of SEQ ID NOs: 546, 549-552, 839, 842, 845, 940, 942-945, 1228, 1230, and 1232, or an active variant or fragment thereof, and a tracrRNA set forth as any one of SEQ ID NOs: 547, 553-562, 840, 842, 846, 941, 946-955, 1229, 1231, and 1233, or an active variant or fragment thereof.

[0178] RGNs useful in the presently disclosed methods and compositions include APG08290.1 RNA-guided nuclease, the amino acid sequence of which is set forth as SEQ ID NO: 844, and active fragments or variants thereof that retain the ability to bind to a target sequence in an RNA-guided sequence-specific manner. In some embodiments, an active variant of an RGN disclosed herein comprises an amino acid sequence having at least 40%, 45%, 50%, 55%, 60%, 65%, 70%, 75%, 80%, 85%, 90%, 91%, 92%, 93%, 94%, 95%, 96%, 97%, 98%, 99% or more sequence identity to the amino acid sequence set forth as SEQ ID NO: 844. In some embodiments, an active fragment of the APG08290.1 RGN comprises at least 50, 100, 150, 200, 250, 300, 350, 400, 450, 500, 550, 600, 650, 700, 750, 800, 850, 900, 950, 1000, 1050 or more contiguous amino acid residues of the amino acid sequence set forth as SEQ ID NO: 844.

[0179] In some embodiments, the presently disclosed compositions and methods comprise an RGN capable of binding a target sequence of the disclosure or an RGN having an amino acid sequence set forth as SEQ ID NO: 844, or an active variant or fragment thereof, wherein the RGN is capable of binding a target sequence adjacent to a PAM consensus sequence set forth as NNRNCC. In some embodiments, the PAM sequence is 3′ of the target sequence on its non-target strand. In some embodiments, the RGN binds to a guide RNA having a sequence set forth as any one of SEQ ID NOs: 693-834, and 1086-1227. In some embodiments, the RGN binds to a guide RNA comprising a CRISPR repeat set forth as any one of SEQ ID NOs: 546, 549-552, 839, 842, 845, 940, 942-945, 1228, 1230, and 1232, or an active variant or fragment thereof, and a tracrRNA set forth as any one of SEQ ID NOs: 547, 553-562, 840, 842, 846, 941, 946-955, 1229, 1231, and 1233, or an active variant or fragment thereof.

[0180] In some embodiments, the presently disclosed compositions and methods comprise an RGN capable of binding a target sequence of the disclosure or an RGN having an amino acid sequence set forth as SEQ ID NO: 844, or an active variant or fragment thereof, wherein the RGN is capable of binding a target sequence adjacent to a full PAM sequence set forth as any one of CAACCCCA, AACCCCAG, TTGTCCAA, CAGGCCTG, GGGTCCTT, CAAGCCCT, ATGCCCAA, CCAACCCC, CATGCCAC, GCCACCAT, GGACCCGA, CCTTCCTT, TTGGCCCT, GGGGCCGA, CTCGCCCA, GCACCCAA, CCCTCCAG, CAGCCCTC, GGCCCCCA, GGGCCCCC, GGCCCCGG, AGGGCCGA, TCCCCCTG, TTCCCCCT, GTTCCCCC, GGTTCCCC, GGGGCCCA, CGGCCCTG, GGGCCCAT, TCGGCCCT, CATGCCTC, GCCTCCTC, TCTTCCTT, TGGCCC, CAGACC, TCGGCC, CTTGCC, GGCCCC, GCAGCC, AAGCCC, GCCTCC, GCCACC, ATCCCC, AAAGCC, CCATCC, CCTTCC, TGGGCC, GGGCCC, CGGGCC, AACCCC, TCGCCC, CATGCC, AGGGCC, TGAACC, CCCGCC, TCTTCC, and GGCTCC. In some embodiments, the PAM sequence is 3′ of the target sequence on its non-target strand. In some embodiments, the RGN binds to a guide RNA having a sequence set forth as any one of SEQ ID NOs: 693-834, and 1086-1227. In some embodiments, the RGN binds to a guide RNA comprising a CRISPR repeat set forth as any one of SEQ ID NOs: 546, 549-552, 839, 842, 845, 940, 942-945, 1228, 1230, and 1232, or an active variant or fragment thereof, and a tracrRNA set forth as any one of SEQ ID NOs: 547, 553-562, 840, 842, 846, 941, 946-955, 1229, 1231, and 1233, or an active variant or fragment thereof.

[0181] In some embodiments, the presently disclosed compositions and methods comprise an RGN capable of binding a target sequence of the disclosure or an RGN having an amino acid sequence set forth as SEQ ID NO: 835, or an active variant or fragment thereof, wherein the RGN is capable of binding a target sequence adjacent to a full PAM sequence set forth as any one of GGGTCCTT, GGGGCCGA, GGGGCCCA, CGGCCCTG, GGGCCCAT, TGGCCC, TGGGCC, GGGCCC, CGGGCC, and AGGGCC. In some embodiments, the PAM sequence is 3′ of the target sequence on its non-target strand. In some embodiments, the RGN binds to a guide RNA comprising a CRISPR repeat set forth as SEQ ID NO: 918, or an active variant or fragment thereof, and a tracrRNA set forth as SEQ ID NO: 919, or an active variant or fragment thereof.

[0182] In some embodiments, the presently disclosed compositions and methods comprise an RGN capable of binding a target sequence of the disclosure or an RGN having an amino acid sequence set forth as SEQ ID NO: 915, or an active variant or fragment thereof, wherein the RGN is capable of binding a target sequence adjacent to a full PAM sequence set forth as any one of TCGGCCCT, CAGGCCTG, TCGGCC, and CGGGCC. In some embodiments, the PAM sequence is 3′ of the target sequence on its non-target strand. In some embodiments, the RGN binds to a guide RNA comprising a CRISPR repeat set forth as SEQ ID NO: 916, or an active variant or fragment thereof, and a tracrRNA set forth as SEQ ID NO: 917, or an active variant or fragment thereof.

[0183] According to the present invention, the presently disclosed target sequences within the FOXP3 gene are bound by an RGN. The target strand of the target sequence hybridizes with the guide RNA associated with the RGN. The target strand and/or the non-target strand of the target sequence (e.g., target DNA sequence) can then be subsequently cleaved by the RGN if the polypeptide possesses nuclease activity. The terms “cleave” or “cleavage” refer to the hydrolysis of at least one phosphodiester bond within the backbone of one or both strands of a double-stranded target sequence (e.g., target DNA sequence) that can result in either single-stranded or double-stranded breaks within the target DNA sequence. The cleavage of a presently disclosed target sequence can result in staggered breaks or blunt ends.

[0184] In some embodiments, the RGN used in the presently disclosed compositions and methods functions as a nickase, only cleaving a single strand of a double-stranded target sequence (e.g., target DNA sequence). Such RGNs have a single functioning nuclease domain. In some embodiments, the nickase is capable of cleaving the target strand or the non-target strand of the double-stranded target sequence (e.g., target DNA sequence). In embodiments where a nickase is used, in order to effect a double-stranded cleavage of a target sequence within the FOXP3 gene, two nickases are needed, each of which nicks a single strand within the target sequence. In some embodiments, additional nuclease domains have been mutated such that the nuclease activity is reduced or eliminated.

[0185] In some embodiments, the RGN lacks nuclease activity altogether and is referred to herein as nuclease-dead or nuclease inactive. Any method known in the art for introducing mutations into an amino acid sequence, such as PCR-mediated mutagenesis and site-directed mutagenesis, can be used for generating nickases or nuclease-dead RGNs. See, e.g., U.S. Publ. No. 2014/0068797 and U.S. Pat. No. 9,790,490; each of which is incorporated by reference in its entirety.

[0186] In some embodiments, nucleases other than RGNs are used in the presently disclosed compositions and methods. These nucleases can bind to additional target sequences of the FOXP3 gene distinct from the presently disclosed target sequences. As used herein, the term “nuclease” refers to an enzyme that catalyzes the cleavage of phosphodiester bonds between nucleotides in a nucleic acid molecule. In general, the nuclease is an endonuclease, which is capable of cleaving phosphodiester bonds between nucleotides within a nucleic acid molecule. In some embodiments, the sequence-specific nuclease is selected from the group consisting of a meganuclease, a zinc finger nuclease, a TAL-effector DNA binding domain-nuclease fusion protein (TALEN), and an RNA-guided nuclease (RGN) or variants thereof wherein the nuclease activity has been reduced or inhibited.

[0187] As used herein, the term “meganuclease” or “homing endonuclease” refers to endonucleases that bind a recognition site within double-stranded DNA that is 12 to 40 bp in length. Non-limiting examples of meganucleases are those that belong to the LAGLIDADG family that comprise the conserved amino acid motif LAGLIDADG (SEQ ID NO: 921). The term “meganuclease” can refer to a dimeric or single-chain meganuclease.

[0188] As used herein, the term “zinc finger nuclease” or “ZFN” refers to a chimeric protein comprising a zinc finger DNA-binding domain and a nuclease domain.

[0189] As used herein, the term “TAL-effector DNA binding domain-nuclease fusion protein” or “TALEN” refers to a chimeric protein comprising a TAL effector DNA-binding domain and a nuclease domain.

[0190] RGNs or nucleases (such as meganucleases, zinc finger nucleases, or TALENs) that lack nuclease activity and therefore, function as a DNA-binding polypeptide, can be used to deliver a fused polypeptide, polynucleotide, or small molecule payload to a particular genomic location. In some embodiments, the RGN polypeptide, guide RNA, or nuclease can be fused to a detectable label to allow for detection of a particular sequence. The detectable label or purification tag can be located at the N-terminus, the C-terminus, or an internal location of the RNA-guided nuclease, either directly or indirectly via a linker peptide. In some embodiments, the RGN component of the fusion protein is a nuclease-dead RGN. In some embodiments, the RGN component of the fusion protein is an RGN with nickase activity.

[0191] A detectable label is a molecule that can be visualized or otherwise observed. The detectable label may be fused to the RGN as a fusion protein (e.g., fluorescent protein) or may be a small molecule conjugated to the RGN polypeptide that can be detected visually or by other means. Detectable labels that can be fused to the presently disclosed RGNs as a fusion protein include any detectable protein domain, including but not limited to, a fluorescent protein or a protein domain that can be detected with a specific antibody. Non-limiting examples of fluorescent proteins include green fluorescent proteins (e.g., GFP, EGFP, ZsGreen1) and yellow fluorescent proteins (e.g., YFP, EYFP, ZsYellow1). Non-limiting examples of small molecule detectable labels include radioactive labels, such as ³H and ³⁵S.

[0192] RGN polypeptides can also comprise a purification tag, which is any molecule that can be utilized to isolate a protein or fused protein from a mixture (e.g., biological sample, culture medium). Non-limiting examples of purification tags include biotin, myc, maltose binding protein (MBP), glutathione-S-transferase (GST), and 3× FLAG tag.

[0193] Alternatively, nuclease-dead RGNs can be targeted to the FOXP3 gene to alter the expression of the gene. In some embodiments, the binding of a nuclease-dead RGN to a target sequence within the FOXP3 gene results in the reduction in expression of FOXP3 by interfering with the binding of RNA polymerase or transcription factors within the targeted genomic region. In some embodiments, the RGN (e.g., a nuclease-dead RGN) or its complexed guide RNA further comprises an expression modulator that, upon binding to a target sequence within the FOXP3 gene, serves to either repress or activate the expression of the target gene.

[0194] In some embodiments, the expression modulator comprises a transcriptional repressor domain, which interacts with transcriptional control elements and/or transcriptional regulatory proteins, such as RNA polymerases and transcription factors, to reduce or terminate transcription of the FOXP3 gene. Transcriptional repressor domains are known in the art and include, but are not limited to, Sp1-like repressors, IκB, and Krüppel associated box (KRAB) domains.

[0195] In some embodiments, the expression modulator comprises a transcriptional activation domain, which interacts with transcriptional control elements and/or transcriptional regulatory proteins, such as RNA polymerases and transcription factors, to increase or activate transcription of the FOXP3 gene. Transcriptional activation domains are known in the art and include, but are not limited to, a herpes simplex virus VP16 activation domain and an NFAT activation domain.

[0196] In some embodiments, the expression modulator modulates the expression of the FOXP3 sequence through epigenetic mechanisms. In some embodiments, an epigenetic modulator covalently modifies DNA or histone proteins to alter histone structure and/or chromosomal structure without altering the DNA sequence, leading to changes in gene expression (e.g., upregulation or downregulation). Non-limiting examples of epigenetic modifications include acetylation or methylation of lysine residues, arginine methylation, serine and threonine phosphorylation, and lysine ubiquitination and sumoylation of histone proteins, and methylation and hydroxymethylation of cytosine residues in DNA. Non-limiting examples of epigenetic modulators include histone acetyltransferases, histone deacetylases, histone methyltransferases, histone demethylases, DNA methyltransferases, and DNA demethylases.

[0197] The nuclease-dead RGNs or an RGN with nickase activity can be targeted to particular genomic locations to modify the sequence of a target polynucleotide through fusion to a base-editing polypeptide, for example a deaminase polypeptide or active variant or fragment thereof, that directly chemically modifies (e.g., deaminates) a nucleobase, resulting in conversion from one nucleobase to another. The base-editing polypeptide can be fused to the RGN at its amino-terminal (N-terminal) or carboxy-terminal (C-terminal) end. Additionally, the base-editing polypeptide may be fused to the RGN via a peptide linker. Fusions of base-editing polypeptides and RGNs are described in International Appl. No. PCT/IB2023/061192, filed Nov. 6, 2023, which is herein incorporated by reference in its entirety. A non-limiting example of a deaminase polypeptide that is useful for such compositions and methods includes a cytosine deaminase or an adenosine deaminase (such as the adenosine deaminase base editor described in Gaudelli et al. (2017) Nature 551:464-471, U.S. Publ. Nos. 2017/0121693 and 2018/0073012, and International Publ. No. WO 2018/027078, or any of the deaminases disclosed in International Publ. No. WO 2020/139783, International Publ. No. WO 2022/056254, International Appl. No. PCT/US2022/021271, filed Mar. 22, 2022, and International Appl. No. PCT/IB2023/061192, filed Nov. 6, 2023, each of which is herein incorporated by reference in its entirety). In some embodiments, the deaminase polypeptide that is useful for such presently disclosed compositions and methods is a deaminase disclosed in Table 17 of International Publ. No. WO 2020/139783, which is incorporated herein by reference in its entirety.

[0198] Further, it is known in the art that certain fusion proteins between an RGN and a base-editing enzyme (e.g., cytosine deaminase) may also comprise at least one uracil stabilizing polypeptide that increases the mutation rate of a cytidine, deoxycytidine, or cytosine to a thymidine, deoxythymidine, or thymine in a nucleic acid molecule by a deaminase. Non-limiting examples of uracil stabilizing polypeptides include those disclosed in PCT Publication No. WO 2021/217002 and PCT Publication No. WO 2022/015969, each of which is herein incorporated by reference in its entirety. The disclosed uracil stabilizing polypeptides include USP2, and a uracil glycosylase inhibitor (UGI) domain, which may increase base editing efficiency. Therefore, a fusion protein may comprise an RGN described herein or variant thereof, a deaminase, and optionally at least one uracil stabilizing polypeptide, such as UGI or USP2. In embodiments, the RGN that is fused to the base-editing polypeptide is a nickase that cleaves the DNA strand that is not acted upon by the base-editing polypeptide (e.g., deaminase).

[0199] An RGN may be fused to a reverse transcriptase (RT) editing polypeptide (also referred to as prime editing polypeptide). RT editing (also referred to as prime editing) is a versatile and precise genome editing method that directly writes new genetic information into a specified DNA site using a nucleic acid programmable DNA binding protein working in association with a polymerase (described in, e.g., U.S. Pat. No. 11,447,770B1; WO2021072328; WO2021226558; WO2020156575; WO2021042047; U.S. Ser. No. 11/193,123; each incorporated by reference in its entirety herein). The RT editing system uses an RGN that is a nickase, and the system is programmed with a RT editing guide RNA. The RT editing guide RNA is a guide RNA that both specifies the target sequence and provides the template for polymerization of the replacement strand containing the edit by way of an extension engineered onto the guide RNA (e.g., at the 5′ or 3′ end, or at an internal portion of the guide RNA). The RGN nickase/RT editing polypeptide fusion is guided to the target sequence by the RT editing guide RNA and nicks the non-target strand upstream of sequence to be edited and upstream of the PAM, creating a 3′ flap on the non-target strand. The RT editing guide RNA includes a primer binding site (PBS) that is complementary to the 3′ flap of the non-target strand. In some embodiments, a PBS is at least about 5, 6, 7, 8, 9, 10, 11, 12, 13, 14, 15, 16, 17, 18, 19, 20, 21, 22, 23, 24, 25, 26, 27, 28, 29, 30, 31, 32, 33, 34, 35, 36, 37, 38, 39, 40, 41, 42, 43, 44, 45, 46, 47, 48, 49, or 50 nucleotides in length. In certain embodiments, the RT editing guide RNA comprises a PBS that is at least 5 (e.g., at least 5, 6, 7, 8, 9, 10, 11, 12, 13, 14, 15, 16, 17, 28, 19, or 20) nucleotides in length. In some embodiments, the RT editing guide RNA may comprise a PBS that is at least 8 nucleotides in length. Hybridrization of the PBS and 3′ flap of the non-target strand allows polymerization of the replacement strand containing the edit using the extension of the RT editing guide RNA as template. The extension of the RT editing guide RNA can be formed from RNA or DNA. In the case of an RNA extension, the polymerase of the RT editor can be an RNA-dependent DNA polymerase (such as a reverse transcriptase). In the case of a DNA extension, the polymerase of the RT editor may be a DNA-dependent DNA polymerase.

[0200] The replacement strand containing the desired edit (e.g., a single nucleobase substitution) shares the same sequence as the non-target strand of the target sequence to be edited (with the exception that it includes the desired edit). Through DNA repair and/or replication machinery, the non-target strand of the target sequence is replaced by the newly synthesized replacement strand containing the desired edit. In some cases, RT editing may be thought of as a “search-and-replace” genome editing technology since the RT editors not only search and locate the desired target sequence to be edited, but at the same time, encode a replacement strand containing a desired edit which is installed in place of the corresponding non-target strand of the target sequence. Thus, in some embodiments, a guide RNA of the disclosure comprises an extension comprising an edit template for RT editing. In some embodiments, a RT editing polypeptide that can be fused to an RGN includes a DNA polymerase. In certain embodiments, the DNA polymerase is a reverse transcriptase. In certain embodiments, the RGN is a nickase.

[0201] RGNs or other nucleases that are fused to a polypeptide or domain can be separated or joined by a linker. The term “linker,” as used herein, refers to a chemical group or a molecule linking two molecules or moieties, e.g., a binding domain and a cleavage domain of a nuclease. In some embodiments, a linker joins a gRNA binding domain of an RGN and a detectable label or epigenetic modulator. In some embodiments, a linker joins a nuclease-dead RGN and a detectable label or epigenetic modulator. Typically, the linker is positioned between, or flanked by, two groups, molecules, or other moieties and connected to each one via a covalent bond, thus connecting the two. In some embodiments, the linker is an amino acid or a plurality of amino acids (e.g., a peptide or protein). In some embodiments, the linker is an organic molecule, group, polymer, or chemical moiety. In some embodiments, the linker is 5-100 amino acids in length, for example, 5, 6, 7, 8, 9, 10, 11, 12, 13, 14, 15, 16, 17, 18, 19, 20, 21, 22, 23, 24, 25, 26, 27, 28, 29, 30, 30-35, 35-40, 40-45, 45-50, 50-60, 60-70, 70-80, 80-90, 90-100, 100-150, or 150-200 amino acids in length. Longer or shorter linkers are also contemplated.

[0202] The presently disclosed compositions and methods can utilize RGNs or other nucleases comprising at least one nuclear localization signal (NLS) to enhance transport of the RGN to the nucleus of a cell. Nuclear localization signals are known in the art and generally comprise a stretch of basic amino acids (see, e.g., Lange et al., J. Biol. Chem. (2007) 282:5101-5105). In some embodiments, the RGN comprises 2, 3, 4, 5, 6 or more nuclear localization signals. The nuclear localization signal(s) can be a heterologous NLS. Non-limiting examples of nuclear localization signals useful for the presently disclosed RGNs are the nuclear localization signals of SV40 Large T-antigen, nucleoplasmin, and c-Myc (see, e.g., Ray et al. (2015) Bioconjug Chem 26(6):1004-7). In embodiments, the RGN comprises the NLS sequence set forth as SEQ ID NO: 922 or 923. The RGN or other nuclease can comprise one or more NLS sequences at its N-terminus, C-terminus, or both the N-terminus and C-terminus. For example, the RGN can comprise two NLS sequences at the N-terminal region and four NLS sequences at the C-terminal region.

[0203] In some embodiments, the presently disclosed compositions and methods utilize RGNs or other nucleases comprising at least one cell-penetrating domain that facilitates cellular uptake of the RGN. Cell-penetrating domains are known in the art and generally comprise stretches of positively charged amino acid residues (i.e., polycationic cell-penetrating domains), alternating polar amino acid residues and non-polar amino acid residues (i.e., amphipathic cell-penetrating domains), or hydrophobic amino acid residues (i.e., hydrophobic cell-penetrating domains) (see, e.g., Milletti F. (2012) Drug Discov Today 17:850-860). A non-limiting example of a cell-penetrating domain is the trans-activating transcriptional activator (TAT) from the human immunodeficiency virus 1.

[0204] The nuclear localization signal and/or cell-penetrating domain can be located at the N-terminus, the C-terminus, or in an internal location of the RGN or other nuclease.

V. Polynucleotides Encoding RNA-Guided Nucleases, Single Guide RNAs, CRISPR RNAs, and or tracrRNAs

[0205] The present disclosure provides polynucleotides comprising or encoding the presently disclosed RGNs, crRNAs, tracrRNAs, and/or sgRNAs. Presently disclosed polynucleotides include those comprising or encoding a crRNA comprising a spacer capable of targeting a bound RGN to a target sequence in the FOXP3 gene having the nucleotide sequence set forth as any one of SEQ ID NOs: 1, 3, 5, 7, 9, 11, 13, 15, 17, 19, 21, 23, 25, 27, 29, 31, 33, 35, 37, 39, 41, 43, 45, 47, 49, 51, 53, 55, 57, 59, 61, 63, 65, 67, 69, 71, 73, 75, 77, 79, 81, 83, 85, 87, 89, 91, 93, 95, 97, 99, 101, 103, 105, 107, 109, 111, 113, 115, 117, 119, 121, 123, 125, 127, 129, 131, 133, 135, 137, 139, 141, 143, 145, 147, 149, 151, 153, 155, 157, 159, 161, 163, 165, 167, 169, 171, 173, 175, 177, 179, 181, 183, 185, 187, 189, 191, 193, 195, 197, 199, 201, 203, 205, 207, 209, 211, and 213.

[0206] The use of the term “polynucleotide” or “nucleic acid molecule” is not intended to limit the present disclosure to polynucleotides comprising DNA. Those of ordinary skill in the art will recognize that polynucleotides can comprise ribonucleotides (RNA) and combinations of ribonucleotides and deoxyribonucleotides. Such deoxyribonucleotides and ribonucleotides include both naturally occurring molecules and synthetic analogues. These include peptide nucleic acids (PNAs), PNA-DNA chimers, locked nucleic acids (LNAs), and phosphothiorate linked sequences. The polynucleotides disclosed herein also encompass all forms of sequences including, but not limited to, single-stranded forms, double-stranded forms, DNA-RNA hybrids, triplex structures, stem-and-loop structures, and the like.

[0207] In some of those embodiments wherein the presently disclosed compositions and methods comprise a nucleic acid molecule encoding an RGN, the nucleic acid molecule is an mRNA (messenger RNA) molecule. An mRNA refers to any polynucleotide which encodes a polypeptide of interest and which is capable of being translated to produce the encoded polypeptide of interest in vitro, in vivo, in situ, or ex vivo. In some embodiments, the basic components of an mRNA molecule include at least a coding region, a 5′UTR, a 3′UTR, a 5′ cap and a poly-A tail. In some embodiments, an mRNA encoding an RGN useful in the presently disclosed methods and compositions can include one or more structural and/or chemical modifications or alterations which impart useful properties to the polynucleotide. For instance, a useful property of an mRNA includes the lack of a substantial induction of the innate immune response of a cell into which the mRNA is introduced. A “structural” feature or modification is one in which two or more linked nucleotides are inserted, deleted, duplicated, inverted or randomized in an mRNA without significant chemical modification to the nucleotides themselves. Because chemical bonds will necessarily be broken and reformed to effect a structural modification, structural modifications are of a chemical nature and hence are chemical modifications. However, structural modifications will result in a different sequence of nucleotides. Chemical modifications to mRNA can involve inclusion of 5-methylcytosine, N1-methyl-pseudouridine, pseudouridine, 2-thiouridine, 4-thiouridine, 5-methoxyuridine, 2′Fluoroguanosine, 2′Fluorouridine, 5-bromouridine, 5-(2-carbomethoxyvinyl) uridine, 5-[3(1-E-propenylamino)]uridine, α-thiocytidine, N6-methyladenosine, 5-methylcytidine, N4-acetylcytidine, 5-formylcytidine, or combinations thereof, in an mRNA.

[0208] The nucleic acid molecules encoding RGNs can be codon optimized for expression in an organism of interest (e.g., mammal). A “codon-optimized” coding sequence is a polynucleotide coding sequence having its frequency of codon usage designed to mimic the frequency of preferred codon usage or transcription conditions of a particular host cell. Expression in the particular host cell or organism is enhanced as a result of the alteration of one or more codons at the nucleic acid level such that the translated amino acid sequence is not changed. Nucleic acid molecules can be codon optimized, either wholly or in part. Codon tables and other references providing preference information for a wide range of organisms are available in the art (see, e.g., Gaspar et al. (2012) Bioinformatics 28(20): 2683-2684; Komar et al. (1998) Biol. Chem. 379(10): 1295-1300; and Inouye et al. (2015) Protein Expr. Purif 109: 47-54). Non-limiting examples of codon-optimized coding sequences for RGNs useful in the presently disclosed compositions and methods include SEQ ID NO: 548.

[0209] Polynucleotides encoding the RGNs, crRNAs, tracrRNAs, and/or sgRNAs provided herein can be provided in expression cassettes for in vitro expression or expression in a cell, embryo, or organism of interest. The cassette will include 5′ and 3′ regulatory sequences operably linked to a polynucleotide encoding an RGN, a crRNA, a tracrRNA, and/or an sgRNA provided herein that allows for expression of the polynucleotide. The cassette may additionally contain at least one additional gene or genetic element to be co-transformed into the organism. Where additional genes or elements are included, the components are operably linked. The term “operably linked” is intended to mean a functional linkage between two or more elements. For example, an operable linkage between a promoter and a coding region of interest (e.g., region coding for an RGN, a crRNA, a tracrRNA, and/or an sgRNA) is a functional link that allows for expression of the coding region of interest. Operably linked elements may be contiguous or non-contiguous. When used to refer to the joining of two protein coding regions, by operably linked or “operably fused” is intended that the coding regions are in the same reading frame. In some embodiments, polypeptides that are “operably fused” means that the structure and/or biological activity of each individual peptide is also present in the fusion. Alternatively, the additional gene(s) or element(s) can be provided on multiple expression cassettes. For example, the nucleotide sequence encoding a presently disclosed RGN can be present on one expression cassette, whereas the nucleotide sequence encoding a crRNA, a tracrRNA, or a complete guide RNA can be on a separate expression cassette. Such an expression cassette is provided with a plurality of restriction sites and/or recombination sites for insertion of the polynucleotides to be under the transcriptional regulation of the regulatory regions. The expression cassette may additionally contain a selectable marker gene.

[0210] The expression cassette will include in the 5′-3′ direction of transcription, a transcriptional (and, in some embodiments, translational) initiation region (i.e., a promoter), an RGN-, crRNA-, tracrRNA-and/or sgRNA-encoding polynucleotide of the disclosure, and a transcriptional (and in some embodiments, translational) termination region (i.e., termination region) functional in the organism of interest. The promoters of the disclosure are capable of directing or driving expression of a coding sequence in a host cell. The regulatory regions (e.g., promoters, transcriptional regulatory regions, and translational termination regions) may be endogenous or heterologous to the host cell or to each other. As used herein, “heterologous” in reference to a sequence is a sequence that originates from a foreign species, or, if from the same species, is substantially modified from its native form in composition and/or genomic locus by deliberate human intervention. As used herein, a chimeric gene comprises a coding sequence operably linked to a transcription initiation region that is heterologous to the coding sequence.

[0211] Convenient termination regions include ones from simian virus (SV40), human growth hormone (hGH), bovine growth hormone (BGH), and rabbit beta-globin (rbGlob). See also Proudfoot (1991) Cell 64:671-674; Munroe et al. (1990) Gene 91:151-158; Schek et al. (1992) Molecular and Cellular Biology 12(12):5386-5393; Gil and Proudfoot (1987) Cell 49(3):399-406; Goodwin and Rottman (1992) The Journal of Biological Chemistry 267(23):16330-16334; and Lanoix and Acheson (1988) EMBO J. 7(8): 2515-2522.

[0212] Additional regulatory signals include, but are not limited to, transcriptional initiation start sites, operators, activators, enhancers, other regulatory elements, ribosomal binding sites, an initiation codon, termination signals, and the like. See, for example, Sambrook et al. (1992) Molecular Cloning: A Laboratory Manual, ed. Maniatis et al. (Cold Spring Harbor Laboratory Press, Cold Spring Harbor, N.Y.), hereinafter “Sambrook 11”; Davis et al., eds. (1980) Advanced Bacterial Genetics (Cold Spring Harbor Laboratory Press), Cold Spring Harbor, N.Y., and the references cited therein.

[0213] In preparing the expression cassette, the various DNA fragments may be manipulated, so as to provide for the DNA sequences in the proper orientation and, as appropriate, in the proper reading frame. Toward this end, adapters or linkers may be employed to join the DNA fragments or other manipulations may be involved to provide for convenient restriction sites, removal of superfluous DNA, removal of restriction sites, or the like. For this purpose, in vitro mutagenesis, primer repair, restriction, annealing, resubstitutions, e.g., transitions and transversions, may be involved.

[0214] A number of promoters can be used in the practice of the invention. The promoters can be selected based on the desired outcome. The nucleic acids can be combined with constitutive, inducible, growth stage-specific, cell type-specific, tissue-preferred, tissue-specific, or other promoters for expression in the organism of interest.

[0215] Exemplary constitutive promoters for expression in cells of the present disclosure include: an SV40 early promoter; a mouse mammary tumor virus long terminal repeat (LTR) promoter; adenovirus major late promoter (Ad MLP); a herpes simplex virus (HSV) promoter; a cytomegalovirus (CMV) promoter such as the CMV immediate early promoter region (CMVIE); a rous sarcoma virus (RSV) promoter; a human ubiquitin C promoter (UBC); a human U6 small nuclear promoter (U6); an enhanced U6 promoter; a human H1 promoter from RNA polymerase III (H1); a human elongation factor 1α promoter (EF1A); a human beta-actin promoter (ACTB); a human or mouse phosphoglycerate kinase 1 promoter (PGK); a chicken β-Actin promoter coupled with CMV early enhancer (CAGG); a yeast transcription elongation factor promoter (TEF1); and the like. See, for example, Miyagishi et al. (2002) Nature Biotechnology 20:497-500; Xia et al. (2003) Nucleic Acids Res. 31(17):e100-e100; Pasleau et al. (1985) Gene 38:227-232; Martin-Gallardo et al. (1988) Gene 70: 51-56; Oellig and Seliger (1990) J Neurosci Res 26: 390-396; Manthorpe et al. (1993) Hum Gene Ther 4: 419-431; Yew et al. (1997) Hum Gene Ther 8: 575-584; Xu et al. (2001) Gene 272: 149-156; Nguyen et al. (2008) J Surg Res 148: 60-66; Costa et al. (2005) Nat Meth. 2:259-260; Lam and Truong (2020) ACS Synth. Biol. 9(10):2625-2631.

[0216] Examples of inducible promoters include: stress-regulated promoters such as Hsp70 and Hsp90 promoters (Wurm et al. (1986) Proc. Natl. Acad. Sci. USA. 83:5414-5418; Nover L. Heat Shock Response. CRC Press; Boca Raton, FL, USA: 1991); metal-regulated promoters (Mayo et al. (1982) Cell. 29:99-108; Searle et al. (1985) Mol. Cell. Biol. 5:1480-1489); hormone-responsive promoters including a glucocorticoid-responsive promoter (Hynes et al. (1981) Proc. Natl. Acad. Sci. USA. 78:2038-2042; Klock et al. (1987) Nature. 329:734-736). Chemically regulated promoters from prokaryotes that have been used include isopropyl-beta-D-thiogalactopyranoside (IPTG)-regulated promoters, lactose-regulated promoters, and tetracycline-reulated promoters (see, for example, Gossen et al. (1993) Trends Biochem Sci. 18:471-475; Gossen and Bujard (1992) Proc. Natl Acad. Sci. USA 89:5547-5551; Zhou et al. (2006) Gene Ther. 13:1382-1390). Inducible expression can be obtained using operator systems including AlcR/acetaldehyde, ArgR/L-arginine, BirA/biotinyl-AMP, CymR/cumate, EthR/2-phenylethylbutyrate, HdnoR/6-hydroxynicotine, HucR/uric acid, MphR(A)/macrolides, PIP/Streptogramins, Rex/NADH, RheA/heat, ScbR/SCB1, TraR/3-oxo-C8-HSL, and TtgR/phloretin; see, for example, U.S. Pat. No. 8,728,759B2; U.S. Pat. No. 7,745,592B2; Weber and Fussenegger (2004) Methods Mol. Biol. 267:451-466; Hartenbach et al. (2007) Nucleic Acids Res. 35:e136; Weber et al. (2009) Metab. Eng. 11:117-124; Weber et al. (2008) Proc. Natl. Acad. Sci. USA. 105:9994-9998; Malphettes et al. (2005) Nucleic Acids Res. 33:e107; Kemmer et al. (2010) Nat. Biotechnol. 28:355-360; Weber et al. (2002) Nat. Biotechnol. 20:901-907; Fussenegger et al. (2000) Nat. Biotechnol. 18:1203-1208; Weber et al. (2006) Metab. Eng. 8:273-280; Weber et al. (2003) Nucleic Acids Res. 31:e69; Weber et al. (2003) Nucleic Acids Res. 31:e71; Neddermann et al. (2003) EMBO Rep. 4:159-165; and Gitzinger et al. (2009) Proc. Natl. Acad. Sci. USA. 106:10638-10643. Inducible expression can be obtained using protein-protein interaction systems including: rapamycin-induced interaction between FKBP12 (FK506 binding protein 12) and mTOR (Rivera et al. (1996) Nat. Med. 2:1028-1032; Belshaw et al. (1996) Proc. Natl. Acad. Sci. USA. 93:4604-46077); abscisic acid (ABA)-regulated interaction between PYL1 (abscisic acid receptor) and ABIl (protein phosphatase 2C56) (Liang et al. (2011) Sci. Signal. 4(164):rs2-rs2); and light-induced protein-protein interaction systems (Wang et al. (2012) Nat. Methods. 9:266-269; Yamada et al. (2018) Cell. Rep. 25:487-500).

[0217] Tissue-specific or tissue-preferred promoters can be utilized to target expression of an expression construct within a particular tissue. In embodiments, the tissue-specific or tissue-preferred promoters are active in mammalian tissue. Examples of tissue-specific or tissue-preferred promoters include promoters that initiate transcription preferentially in certain tissues, such as the heart, CNS, or eye. A “tissue specific” promoter is a promoter that initiates transcription only in certain tissues. Unlike constitutive expression of genes, tissue-specific expression is the result of several interacting levels of gene regulation. As such, promoters from homologous or closely related species can be preferable to use to achieve efficient and reliable expression of transgenes in particular tissues. In some embodiments, the expression comprises a tissue-preferred promoter. A “tissue preferred” promoter is a promoter that initiates transcription preferentially, but not necessarily entirely or solely in certain tissues.

[0218] In some embodiments, the nucleic acid molecules encoding an RGN, crRNA, tracrRNA, and/or sgRNA comprise a cell type-specific promoter. A “cell type specific” promoter is a promoter that primarily drives expression in certain cell types in one or more organs. Some examples of cells in which cell type specific promoters may be primarily active include, for example, a cytotoxic T cell, a regulatory T cell, or a stem cell. The nucleic acid molecules can also include cell type preferred promoters. A “cell type preferred” promoter is a promoter that primarily drives expression mostly, but not necessarily entirely or solely in certain cell types in one or more organs. Some examples of cells in which cell type preferred promoters may be preferentially active include, for example, lymphocyte, neuron, adipocyte, cardiomyocyte, smooth muscle cell, and photoreceptor cell.

[0219] The nucleic acid sequences encoding the RGNs, crRNAs, tracrRNAs, and/or sgRNAs can be operably linked to a promoter sequence that is recognized by a phage RNA polymerase for example, for in vitro mRNA synthesis. In some embodiments, the in vitro-transcribed RNA can be purified for use in the methods described herein. For example, the promoter sequence can be a T7, T3, or SP6 promoter sequence or a variation of a T7, T3, or SP6 promoter sequence. In some embodiments, the expressed protein and/or RNAs can be purified for use in the methods of genome modification described herein.

[0220] In embodiments, the polynucleotide encoding the RGN, crRNA, tracrRNA, and/or sgRNA also can be linked to a polyadenylation signal (e.g., SV40 polyA signal and other signals functional in plants) and/or at least one transcriptional termination sequence. Additionally, the sequence encoding the RGN also can be linked to sequence(s) encoding at least one nuclear localization signal, at least one cell-penetrating domain, and/or at least one signal peptide capable of trafficking proteins to particular subcellular locations, as described elsewhere herein.

[0221] The polynucleotide encoding the RGN, crRNA, tracrRNA, and/or sgRNA can be present in a vector or multiple vectors. A “vector” refers to a polynucleotide composition for transferring, delivering, or introducing a nucleic acid into a host cell. Suitable vectors include plasmid vectors, phagemids, cosmids, artificial/mini-chromosomes, transposons, and viral vectors (e.g., lentiviral vectors, adeno-associated viral vectors, baculoviral vector). The vector can comprise additional expression control sequences (e.g., enhancer sequences, Kozak sequences, polyadenylation sequences, transcriptional termination sequences), selectable marker sequences (e.g., antibiotic resistance genes), origins of replication, and the like. Additional information can be found in “Current Protocols in Molecular Biology” Ausubel et al., John Wiley & Sons, New York, 2003 or “Molecular Cloning: A Laboratory Manual” Sambrook & Russell, Cold Spring Harbor Press, Cold Spring Harbor, N.Y., 3rd edition, 2001.

[0222] The vector can also comprise a selectable marker gene for the selection of transformed cells. Selectable marker genes are utilized for the selection of transformed cells or tissues. Marker genes include genes encoding antibiotic resistance, such as those encoding neomycin phosphotransferase II (NEO) and hygromycin phosphotransferase (HPT). Marker genes can include genes that allow selection for growth on a particular nutrient or substance, such as dihydrofolate reductase (DHFR; Simonsen and Levinson (1983) Proc. Natl. Acad. Sci. USA. 80:2495-2499), histidinol dehydrogenase (hisD; Hartman and Mulligan (1988) Proc. Natl. Acad. Sci. USA. 85:8047-8051), puromycin-N-acetyl transferase (PAC or puro; de la Luna et al. (1988) Gene 62:121-126), thymidine kinase (TK; Littlefield (1964) Science 145:709-710), and xanthine-guanine phosphoribosyltransferase (XGPRT or gpt; Mulligan and Berg (1981) Proc. Natl. Acad. Sci. USA. 78:2072-2076).

[0223] In some embodiments, the expression cassette or vector comprising the sequence encoding the RGN polypeptide can further comprise a sequence encoding a crRNA and/or a tracrRNA, or the crRNA and tracrRNA combined to create an sgRNA. The sequence(s) encoding the crRNA and/or tracrRNA can be operably linked to at least one transcriptional control sequence for expression of the crRNA and/or tracrRNA in the organism or host cell of interest. For example, the polynucleotide encoding the crRNA and/or tracrRNA can be operably linked to a promoter sequence that is recognized by RNA polymerase III (Pol III). Examples of suitable Pol III promoters include, but are not limited to, mammalian U6, U3, H1, and 7SL RNA promoters and rice U6 and U3 promoters, such as the human U6 promoter set forth as SEQ ID NO: 924, as well as the promoters disclosed in U.S. Provisional Appl. No. 63/209,660, filed Jun. 11, 2021, and International Application No. PCT/US2022/032940, filed Jun. 10, 2022, each of which is herein incorporated by reference in its entirety, including promoters set forth herein as SEQ ID NOs: 925-934.

[0224] As indicated, expression constructs comprising nucleotide sequences encoding an RGN, a crRNA, a tracrRNA, and/or an sgRNA can be used to transform organisms of interest. Methods for transformation involve introducing a nucleotide construct into an organism of interest. By “introducing” is intended to introduce the nucleotide construct to the host cell in such a manner that the construct gains access to the interior of the host cell. The methods of the disclosure do not require a particular method for introducing a nucleotide construct to a host organism, only that the nucleotide construct gains access to the interior of at least one cell of the host organism. The host cell can be a eukaryotic or prokaryotic cell. In some embodiments, the eukaryotic host cell is a mammalian cell, an avian cell, or an insect cell. In some embodiments, the eukaryotic cell that comprises or expresses a presently disclosed crRNA, tracrRNA, sgRNA, and/or RGN or that has been modified by a presently disclosed RGN system is a human cell. In some embodiments, the eukaryotic cell that comprises or expresses a presently disclosed crRNA, tracrRNA, sgRNA, and/or RGN or that has been modified by a presently disclosed RGN system is a stem cell, including an induced pluripotent stem cell. In some embodiments, the mammalian or human cell that comprises or expresses a presently disclosed crRNA, tracrRNA, sgRNA, and/or RGN or that has been modified by a presently disclosed RGN system is a lymphocyte. In some embodiments, the lymphocyte includes a cytotoxic T cell or a regulatory T cell.

[0225] Methods for introducing nucleotide constructs into host cells are known in the art including, but not limited to, stable transformation methods, transient transformation methods, and virus-mediated methods.

[0226] The presently disclosed methods can result in a transformed organism or cell line derived from these transformed cells.

[0227] “Transgenic organisms” or “transformed organisms” or “stably transformed” organisms or cells or tissues refers to organisms that have incorporated or integrated a polynucleotide encoding an RGN, a crRNA, a tracrRNA, and/or an sgRNA of the disclosure. It is recognized that other exogenous or endogenous nucleic acid sequences or DNA fragments may also be incorporated into the host cell. Transformation of a host cell may be performed by infection, conjugation, transfection, microinjection, electroporation, microprojection, biolistics or particle bombardment, electroporation, silica/carbon fibers, ultrasound mediated, PEG mediated, calcium phosphate co-precipitation, polycation DMSO technique, DEAE dextran procedure, and viral mediated, liposome mediated and the like. Viral-mediated introduction of a polynucleotide encoding an RGN, a crRNA, a tracrRNA, and/or an sgRNA includes retroviral, lentiviral, adenoviral, and adeno-associated viral mediated introduction and expression.

[0228] Transformation may result in stable or transient incorporation of the nucleic acid into the cell. “Stable transformation” is intended to mean that the nucleotide construct introduced into a host cell integrates into the genome of the host cell and is capable of being inherited by the progeny thereof. “Transient transformation” is intended to mean that a polynucleotide is introduced into the host cell and does not integrate into the genome of the host cell.

[0229] In some embodiments, cells that have been transformed may be introduced into an organism. These cells could have originated from the organism, wherein the cells are transformed in an ex vivo approach. These cells can be autologous (originated and returned to the same subject), allogeneic (the donor and recipient subjects are of the same species). In general, the donor and recipient of allogeneic cells are a complete or partial HLA match.

[0230] The polynucleotides encoding the RGNs, crRNAs, tracrRNAs, and/or sgRNAs or comprising the crRNAs, tracrRNAs, and/or sgRNAs can also be used to transform any prokaryotic species, including but not limited to, archaea and bacteria (e.g., Bacillus sp., Klebsiella sp. Streptomyces sp., Rhizobium sp., Escherichia sp., Pseudomonas sp., Salmonella sp., Shigella sp., Vibrio sp., Yersinia sp., Mycoplasma sp., Agrobacterium, Lactobacillus sp.).

[0231] The polynucleotides encoding the RGNs, crRNAs, tracrRNAs, and/or sgRNAs or comprising the crRNAs, tracrRNAs, and/or sgRNAs can be used to transform any eukaryotic species, including but not limited to animals (e.g., mammals, humans, insects, fish, birds, and reptiles), fungi, amoeba, algae, and yeast.

[0232] Conventional viral and non-viral based gene transfer methods can be used to introduce nucleic acids in mammalian, insect, or avian cells or target tissues. Such methods can be used to administer nucleic acids encoding components of an RGN system to cells in culture, or in a host organism. Non-viral vector delivery systems include DNA plasmids, RNA (e.g., a transcript of a vector described herein), naked nucleic acid, and nucleic acid complexed with a delivery vehicle, such as a liposome. Viral vector delivery systems include DNA and RNA viruses, which have either episomal or integrated genomes after delivery to the cell. For a review of gene therapy procedures, see Anderson, Science 256: 808-813 (1992); Nabel & Feigner, TIBTECH 11:211-217 (1993); Mitani & Caskey, TIBTECH 11:162-166 (1993); Dillon, TIBTECH 11:167-175 (1993); Miller, Nature 357:455-460 (1992); Van Brunt, Biotechnology 6(10): 1149-1154 (1988); Vigne, Restorative Neurology and Neuroscience 8:35-36 (1995); Kremer & Perricaudet, British Medical Bulletin 51(1):31-44 (1995); Haddada et al., in Current Topics in Microbiology and Immunology, Doerfler and Bohm (eds) (1995); and Yu et al., Gene Therapy 1:13-26 (1994).

[0233] Methods of non-viral delivery of nucleic acids include lipofection, nucleofection, microinjection, biolistics, virosomes, liposomes, immunoliposomes, polycation or lipid:nucleic acid conjugates, naked DNA, artificial virions, and agent-enhanced uptake of DNA. Lipofection is described in e.g., U.S. Pat. Nos. 5,049,386, 4,946,787; and 4,897,355) and lipofection reagents are sold commercially (e.g., Transfectam™ and Lipofectin™). Cationic and neutral lipids that are suitable for efficient receptor-recognition lipofection of polynucleotides include those of Feigner, WO 91/17424; WO 91/16024. Delivery can be to cells (e.g. in vitro or ex vivo administration) or target tissues (e.g. in vivo administration). The preparation of lipid:nucleic acid complexes, including targeted liposomes such as immunolipid complexes, is well known to one of skill in the art (see, e.g., Crystal, Science 270:404-410 (1995); Blaese et al., Cancer Gene Ther. 2:291-297 (1995); Behr et al., Bioconjugate Chem. 5:382-389 (1994); Remy et al., Bioconjugate Chem. 5:647-654 (1994); Gao et al., Gene Therapy 2:710-722 (1995); Ahmad et al., Cancer Res. 52:4817-4820 (1992); U.S. Pat. Nos. 4,186,183, 4,217,344, 4,235,871, 4,261,975, 4,485,054, 4,501,728, 4,774,085, 4,837,028, and 4,946,787).

[0234] The use of RNA or DNA viral based systems for the delivery of nucleic acids takes advantage of highly evolved processes for targeting a virus to specific cells in the body and trafficking the viral payload to the nucleus. Viral vectors can be administered directly to patients (in vivo) or they can be used to treat cells in vitro, and the modified cells may optionally be administered to patients (ex vivo). Conventional viral based systems could include retroviral, lentivirus, adenoviral, adeno-associated and herpes simplex virus vectors for gene transfer. Integration in the host genome is possible with the retrovirus, lentivirus, and adeno-associated virus gene transfer methods, often resulting in long term expression of the inserted transgene. Additionally, high transduction efficiencies have been observed in many different cell types and target tissues.

[0235] The tropism of a retrovirus can be altered by incorporating foreign envelope proteins, expanding the potential target population of target cells. Lentiviral vectors are retroviral vectors that are able to transduce or infect non-dividing cells and typically produce high viral titers. Selection of a retroviral gene transfer system would therefore depend on the target tissue. Retroviral vectors are comprised of cis-acting long terminal repeats with packaging capacity for up to 6-10 kb of foreign sequence. The minimum cis-acting LTRs are sufficient for replication and packaging of the vectors, which are then used to integrate the therapeutic gene into the target cell to provide permanent transgene expression. Widely used retroviral vectors include those based upon murine leukemia virus (MuLV), gibbon ape leukemia virus (GaLV), Simian Immuno deficiency virus (SIV), human immuno deficiency virus (HIV), and combinations thereof (see, e.g., Buchscher et al., J. Viral. 66:2731-2739 (1992); Johann et al., J. Viral. 66:1635-1640 (1992); Sommnerfelt et al., Viral. 176:58-59 (1990); Wilson et al., J. Viral. 63:2374-2378 (1989); Miller et al., J. Viral. 65:2220-2224 (1991); PCT/US94/05700).

[0236] In applications where transient expression is preferred, adenoviral based systems may be used. Adenoviral based vectors are capable of very high transduction efficiency in many cell types and do not require cell division. With such vectors, high titer and levels of expression have been obtained. This vector can be produced in large quantities in a relatively simple system. Adeno-associated virus (“AAV”) vectors may also be used to transduce cells with target nucleic acids, e.g., in the in vitro production of nucleic acids and peptides, and for in vivo and ex vivo gene therapy procedures (see, e.g., West et al., Virology 160:38-47 (1987); U.S. Pat. No. 4,797,368; WO 93/24641; Katin, Human Gene Therapy 5:793-801 (1994); Muzyczka, 1. Clin. Invest. 94:1351 (1994). Construction of recombinant AAV vectors are described in a number of publications, including U.S. Pat. No. 5,173,414; Tratschin et al., Mol. Cell. Biol. 5:3251-3260 (1985); Tratschin, et al., Mol. Cell. Biol. 4:2072-2081 (1984); Hermonat & Muzyczka, PNAS 81:6466-6470 (1984); and Samulski et al., J. Viral. 63:03822-3828 (1989). Packaging cells are typically used to form virus particles that are capable of infecting a host cell. Such cells include 293 cells, which package adenovirus, and ψJ2 cells or PA317 cells, which package retrovirus.

[0237] Viral vectors used in gene therapy are usually generated by producing a cell line that packages a nucleic acid vector into a viral particle. The vectors typically contain the minimal viral sequences required for packaging and subsequent integration into a host, other viral sequences being replaced by an expression cassette for the polynucleotide(s) to be expressed. The missing viral functions are typically supplied in trans by the packaging cell line. For example, AAV vectors used in gene therapy typically only possess ITR sequences from the AAV genome which are required for packaging and integration into the host genome. Viral DNA is packaged in a cell line, which contains a helper plasmid encoding the other AAV genes, namely rep and cap, but lacking ITR sequences.

[0238] The cell line may also be infected with adenovirus as a helper. The helper virus promotes replication of the AAV vector and expression of AAV genes from the helper plasmid. The helper plasmid is not packaged in significant amounts due to a lack of ITR sequences. Contamination with adenovirus can be reduced by, e.g., heat treatment to which adenovirus is more sensitive than AAV. Additional methods for the delivery of nucleic acids to cells are known to those skilled in the art. See, for example, US20030087817, incorporated herein by reference.

[0239] In some embodiments, a host cell is transiently or non-transiently transfected with one or more nucleic acid molecules or vectors described herein. In some embodiments, a cell is transfected as it naturally occurs in a subject. In some embodiments, a cell that is transfected is taken from a subject. In embodiments, the cell is derived from cells taken from a subject, such as a cell line. In some embodiments, the cell line may be mammalian, insect, or avian cells. A wide variety of cell lines for tissue culture are known in the art. Examples of cell lines include, but are not limited to, C8161, CCRF-CEM, MOLT, mIMCD-3, NHDF, HeLaS3, Huh1, Huh4, Huh7, HUVEC, HASMC, HEKn, HEKa, MiaPaCell, Panel, PC-3, TFl, CTLL-2, CIR, Rat6, CVI, RPTE, AlO, T24, 182, A375, ARH-77, Calul, SW480, SW620, SKOV3, SK-UT, CaCo2, P388D1, SEM-K2, WEHI-231, HB56, TIB55, lurkat, 145.01, LRMB, Bcl-1, BC-3, IC21, DLD2, Raw264.7, NRK, NRK-52E, MRC5, MEF, Hep G2, HeLa B, HeLa T4. COS, COS-1, COS-6, COS-M6A, BS-C-1 monkey kidney epithelial, BALB/3T3 mouse embryo fibroblast, 3T3 Swiss, 3T3-Ll, 132-d5 human fetal fibroblasts; 10.1 mouse fibroblasts, 293-T, 3T3, 721, 9L, A2780, A2780ADR, A2780cis, A172, A20, A253, A431, A-549, ALC, B16, B35, BCP-I cells, BEAS-2B, bEnd.3, BHK-21, BR 293, BxPC3, C3H-10Tl/2, C6/36, Cal-27, CHO, CHO-7, CHO-IR, CHO-K1, CHO-K2, CHO-T, CHO Dhfr−/−, COR-L23, COR-L23/CPR, COR-L235010, CORL23/R23, COS-7, COV-434, CML Tl, CMT, CT26, D17, DH82, DU145, DuCaP, EL4, EM2, EM3, EMT6/AR1, EMT6/AR10.0, FM3, H1299, H69, HB54, HB55, HCA2, HEK-293, HeLa, Hepa1c1c7, HL-60, HMEC, HT-29, lurkat, lY cells, K562 cells, Ku812, KCL22, KGl, KYOl, LNCap, Ma-Mel 1-48, MC-38, MCF-7, MCF-10A, MDA-MB-231, MDA-MB-468, MDA-MB-435, MDCKII, MDCKII, MOR/0.2R, MONO-MAC 6, MTD-1A, MyEnd, NCI-H69/CPR, NCI-H69/LX10, NCI-H69/LX20, NCI-H69/LX4, NIH-3T3, NALM-1, NW-145, OPCN/OPCT cell lines, Peer, PNT-1A/PNT 2, RenCa, RIN-5F, RMA/RMAS, Saos-2 cells, Sf-9, SkBr3, T2, T-47D, T84, THP1 cell line, U373, U87, U937, VCaP, Vero cells, WM39, WT-49, X63, YAC-1, YAR, and transgenic varieties thereof. Cell lines are available from a variety of sources known to those with skill in the art (see, e.g., the American Type Culture Collection (ATCC) (Manassas, Va.)).

[0240] In some embodiments, a cell transfected with one or more nucleic acid molecules or vectors described herein is used to establish a new cell line comprising one or more vector-derived sequences. In some embodiments, a cell transiently transfected with the components of an RGN system as described herein (such as by transient transfection of one or more vectors, or transfection with RNA), and modified through the activity of an RGN system, is used to establish a new cell line comprising cells containing the modification but lacking any other exogenous sequence.

[0241] In some embodiments, one or more nucleic acid molecules or vectors described herein are used to produce a non-human transgenic animal. In some embodiments, the transgenic animal is a mammal, such as a mouse, rat, hamster, rabbit, cow, or pig. In some embodiments, the transgenic animal is a bird, such as a chicken or a duck. In some embodiments, the transgenic animal is an insect, such as a mosquito or a tick.

### VI. Variants and Fragments of Polypeptides and Polynucleotides

[0242] The present disclosure provides active variants and fragments of the presently disclosed crRNAs, tracrRNAs, sgRNA backbones, sgRNAs, and RGNs. An active variant or fragment of a naturally-occurring (i.e., wild-type) RGN binds to a target sequence described herein within the FOXP3 gene in an RNA-guided sequence-specific manner. In some embodiments, a target sequence described herein includes a target strand having the nucleotide sequence set forth as any one of SEQ ID NOs: 2, 4, 6, 8, 10, 12, 14, 16, 18, 20, 22, 24, 26, 28, 30, 32, 34, 36, 38, 40, 42, 44, 46, 48, 50, 52, 54, 56, 58, 60, 62, 64, 66, 68, 70, 72, 74, 76, 78, 80, 82, 84, 86, 88, 90, 92, 94, 96, 98, 100, 102, 104, 106, 108, 110, 112, 114, 116, 118, 120, 122, 124, 126, 128, 130, 132, 134, 136, 138, 140, 142, 144, 146, 148, 150, 152, 154, 156, 158, 160, 162, 164, 166, 168, 170, 172, 174, 176, 178, 180, 182, 184, 186, 188, 190, 192, 194, 196, 198, 200, 202, 204, 206, 208, 210, 212, and 214. In some embodiments, the disclosure provides active variants and fragments of an RGN having an amino acid sequence set forth as SEQ ID NO: 545, as well as active variants and fragments of naturally-occurring CRISPR repeats, including sequences set forth as SEQ ID NOs: 546, 549-552, 839, 842, 845, 940, 942-945, 1228, 1230, and 1232, active variants and fragments of naturally-occurring tracrRNAs, such as any one of the sequences set forth as SEQ ID NOs: 547, 553-562, 840, 842, 846, 941, 946-955, 1229, 1231, and 1233, and active variants and fragments of sgRNAs, such as any one of the sequences set forth as SEQ ID NOs: 693-834, and 1086-1227, and polynucleotides encoding the same.

[0243] While the activity of a variant or fragment may be altered compared to the polynucleotide or polypeptide of interest, the variant and fragment should retain the functionality of the polynucleotide or polypeptide of interest. For example, a variant or fragment may have increased activity, decreased activity, different spectrum of activity or any other alteration in activity when compared to the polynucleotide or polypeptide of interest.

[0244] Fragments and variants of naturally-occurring RGN polypeptides, such as those disclosed herein, will retain sequence-specific, RNA-guided DNA-binding activity. In embodiments, fragments and variants of naturally-occurring RGN polypeptides, such as those disclosed herein, retain nuclease activity (single-stranded or double-stranded).

[0245] Fragments and variants of naturally-occurring CRISPR repeats, such as those disclosed herein, will retain the ability, when part of a guide RNA (comprising a tracrRNA), to bind to and guide an RNA-guided nuclease (complexed with the guide RNA) to a target sequence in a sequence-specific manner.

[0246] Fragments and variants of naturally-occurring tracrRNAs, such as those disclosed herein, will retain the ability, when part of a guide RNA (comprising a CRISPR RNA), to guide an RNA-guided nuclease (complexed with the guide RNA) to a target sequence in a sequence-specific manner.

[0247] Fragments and variants of sgRNA backbones, such as those disclosed herein, will retain the ability, when part of a guide RNA, to guide an RNA-guided nuclease (complexed with the guide RNA) to a target sequence in a sequence-specific manner.

[0248] Fragments and variants of sgRNAs, such as those disclosed herein, will retain the ability to guide an RNA-guided nuclease (complexed with the sgRNA) to a target sequence in a sequence-specific manner.

[0249] The term “fragment” refers to a portion of a polynucleotide or polypeptide sequence of the disclosure. “Fragments” or “biologically active portions” include polynucleotides comprising a sufficient number of contiguous nucleotides to retain the biological activity (i.e., binding to and directing an RGN in a sequence-specific manner to a target sequence when comprised within a guide RNA). “Fragments” or “biologically active portions” include polypeptides comprising a sufficient number of contiguous amino acid residues to retain the biological activity (i.e., binding to a target sequence in a sequence-specific manner when complexed with a guide RNA). Fragments of the RGN proteins include those that are shorter than the full-length sequences due to the use of an alternate downstream start site. A biologically active portion of an RGN protein can be a polypeptide that comprises, for example, 10, 25, 50, 100, 150, 200, 250, 300, 350, 400, 450, 500, 550, 600, 650, 700, 750, 800, 850, 900, 950, 1000, 1050, 1100, 1150, 1200, 1250, 1300, 1350, 1400, 1450, 1500, 1550, 1600, 1650, 1700 or more contiguous amino acid residues of an RGN that binds a target nucleotide sequence disclosed herein or of SEQ ID NO: 545. Such biologically active portions can be prepared by recombinant techniques and evaluated for sequence-specific, RNA-guided DNA-binding activity. A biologically active fragment of a CRISPR repeat sequence can comprise at least 8 contiguous nucleotides of any one of SEQ ID NOs: 546, 549-552, 839, 842, 845, 940, 942-945, 1228, 1230, and 1232. A biologically active portion of a CRISPR repeat sequence can be a polynucleotide that comprises, for example, 8, 9, 10, 11, 12, or 13 contiguous nucleotides of any one of SEQ ID NOs: 546, 549-552, 839, 842, 845, 940, 942-945, 1228, 1230, and 1232. A biologically active fragment of a crRNA sequence can comprise at least 20 contiguous nucleotides of any one of SEQ ID NOs: 574-692, and 967-1085. A biologically active portion of a crRNA can be a polynucleotide that comprises, for example, 20, 25, 30, 35, 40 or more contiguous nucleotides of any one of SEQ ID NOs: 574-692, and 967-1085. A biologically active portion of a tracrRNA can be a polynucleotide that comprises, for example, 8, 9, 10, 11, 12, 13, 14, 15, 16, 17, 18, 19, 20, 21, 22, 23, 24, 25, 26, 27, 28, 29, 30, 35, 40, 45, 50, 55, 60, 65, 70, 75, 80 or more contiguous nucleotides of any one of SEQ ID NOs: 547, 553-562, 840, 842, 846, 941, 946-955, 1229, 1231, and 1233. A biologically active portion of a sgRNA backbone can be a polynucleotide that comprises, for example, 8, 9, 10, 11, 12, 13, 14, 15, 16, 17, 18, 19, 20, 21, 22, 23, 24, 25, 26, 27, 28, 29, 30, 35, 40, 45, 50, 55, 60, 65, 70, 75, 80, 85, 90, 95, 100 or more contiguous nucleotides of any one of SEQ ID NOs: 563-573, and 956-966. A biologically active portion of a sgRNA can be a polynucleotide that comprises, for example, 8, 9, 10, 11, 12, 13, 14, 15, 16, 17, 18, 19, 20, 21, 22, 23, 24, 25, 26, 27, 28, 29, 30, 35, 40, 45, 50, 55, 60, 65, 70, 75, 80, 85, 90, 95, 100 or more contiguous nucleotides of any one of SEQ ID NOs: 693-834, and 1086-1227.

[0250] In general, “variants” is intended to mean substantially similar sequences. For polynucleotides, a variant comprises a deletion and/or addition of one or more nucleotides at one or more internal sites within the native polynucleotide and/or a substitution of one or more nucleotides at one or more sites in the native polynucleotide. As used herein, a “native” or “wild type” polynucleotide or polypeptide comprises a naturally occurring nucleotide sequence or amino acid sequence, respectively. For polynucleotides, conservative variants include those sequences that, because of the degeneracy of the genetic code, encode the native amino acid sequence of the gene of interest. Naturally occurring allelic variants such as these can be identified with the use of well-known molecular biology techniques, as, for example, with polymerase chain reaction (PCR) and hybridization techniques as outlined below. Variant polynucleotides also include synthetically derived polynucleotides, such as those generated, for example, by using site-directed mutagenesis but which still encode the polypeptide or the polynucleotide of interest. Generally, variants of a particular polynucleotide disclosed herein will have at least about 40%, 45%, 50%, 55%, 60%, 65%, 70%, 75%, 80%, 85%, 90%, 91%, 92%, 93%, 94%, 95%, 96%, 97%, 98%, 99% or more sequence identity to that particular polynucleotide as determined by sequence alignment programs and parameters described elsewhere herein.

[0251] Variants of a particular polynucleotide disclosed herein (i.e., the reference polynucleotide) can also be evaluated by comparison of the percent sequence identity between the polypeptide encoded by a variant polynucleotide and the polypeptide encoded by the reference polynucleotide. Percent sequence identity between any two polypeptides can be calculated using sequence alignment programs and parameters described elsewhere herein. Where any given pair of polynucleotides disclosed herein is evaluated by comparison of the percent sequence identity shared by the two polypeptides they encode, the percent sequence identity between the two encoded polypeptides is at least about 40%, 45%, 50%, 55%, 60%, 65%, 70%, 75%, 80%, 85%, 90%, 91%, 92%, 93%, 94%, 95%, 96%, 97%, 98%, 99% or more sequence identity.

[0252] In certain embodiments, the presently disclosed polynucleotides encode an RNA-guided nuclease polypeptide comprising an amino acid sequence having at least 40%, 45%, 50%, 55%, 60%, 65%, 70%, 75%, 80%, 81%, 82%, 83%, 84%, 85%, 86%, 87%, 88%, 89%, 90%, 91%, 92%, 93%, 94%, 95%, 96%, 97%, 98%, 99%, or greater identity to an amino acid sequence encoding an RGN that binds a target sequence disclosed herein or an amino acid sequence set forth as SEQ ID NO: 545.

[0253] A biologically active variant of an RGN polypeptide of the disclosure may differ by as few as about 1-15 amino acid residues, as few as about 1-10, such as about 6-10, as few as 5, as few as 4, as few as 3, as few as 2, or as few as 1 amino acid residue. In some embodiments, the polypeptides can comprise an N-terminal or a C-terminal truncation, which can comprise at least a deletion of 10, 15, 20, 25, 30, 35, 40, 45, 50, 55, 60, 65, 70, 75, 80, 85, 90, 95, 100, 150, 200, 250, 300, 350, 400, 450, 500, 550, 600, 650, 700, 750, 800, 850, 900, 950, 1000, 1050, 1100, 1150, 1200, 1250, 1300, 1350, 1400, 1450, 1500, 1550, 1600, 1650, 1700 amino acids or more from either the N or C terminus of the polypeptide.

[0254] In some embodiments, the presently disclosed polynucleotides comprise or encode a crRNA repeat comprising a nucleotide sequence having at least 40%, 45%, 50%, 55%, 60%, 65%, 70%, 75%, 80%, 81%, 82%, 83%, 84%, 85%, 86%, 87%, 88%, 89%, 90%, 91%, 92%, 93%, 94%, 95%, 96%, 97%, 98%, 99%, or greater identity to the nucleotide sequence set forth as any one of SEQ ID NOs: 546, 549-552, 839, 842, 845, 940, 942-945, 1228, 1230, and 1232.

[0255] In some embodiments, the presently disclosed polynucleotides comprise or encode a crRNA comprising a nucleotide sequence having at least 40%, 45%, 50%, 55%, 60%, 65%, 70%, 75%, 80%, 81%, 82%, 83%, 84%, 85%, 86%, 87%, 88%, 89%, 90%, 91%, 92%, 93%, 94%, 95%, 96%, 97%, 98%, 99%, or greater identity to the nucleotide sequence set forth as any one of SEQ ID NOs: 574-692, and 967-1085.

[0256] The presently disclosed polynucleotides can comprise or encode a tracrRNA comprising a nucleotide sequence having at least 40%, 45%, 50%, 55%, 60%, 65%, 70%, 75%, 80%, 81%, 82%, 83%, 84%, 85%, 86%, 87%, 88%, 89%, 90%, 91%, 92%, 93%, 94%, 95%, 96%, 97%, 98%, 99%, or greater identity to the nucleotide sequence set forth as any one of SEQ ID NOs: 547, 553-562, 840, 842, 846, 941, 946-955, 1229, 1231, and 1233.

[0257] The presently disclosed polynucleotides can comprise or encode an sgRNA backbone comprising a nucleotide sequence having at least 40%, 45%, 50%, 55%, 60%, 65%, 70%, 75%, 80%, 81%, 82%, 83%, 84%, 85%, 86%, 87%, 88%, 89%, 90%, 91%, 92%, 93%, 94%, 95%, 96%, 97%, 98%, 99%, or greater identity to the nucleotide sequence set forth as any one of SEQ ID NOs: 563-573, and 956-966.

[0258] The presently disclosed polynucleotides can comprise or encode an sgRNA comprising a nucleotide sequence having at least 40%, 45%, 50%, 55%, 60%, 65%, 70%, 75%, 80%, 81%, 82%, 83%, 84%, 85%, 86%, 87%, 88%, 89%, 90%, 91%, 92%, 93%, 94%, 95%, 96%, 97%, 98%, 99%, or greater identity to the nucleotide sequence set forth as any one of SEQ ID NOs: 693-834, and 1086-1227.

[0259] Biologically active variants of a CRISPR repeat, crRNA, tracrRNA, sgRNA backbone, or sgRNA of the disclosure may differ by as few as about 1-15 nucleotides, as few as about 1-10, such as about 6-10, as few as 5, as few as 4, as few as 3, as few as 2, or as few as 1 nucleotide. In some embodiments, the polynucleotides can comprise a 5′ or 3′ truncation, which can comprise at least a deletion of5, 10, 15, 20, 25, 30, 35, 40, 45, 50, 55, 60, 65, 70, 75, 80, 90, 95, 100, 105, 110 nucleotides or more from either the 5′ or 3′ end of the polynucleotide.

[0260] It is recognized that modifications may be made to the RGN polypeptides, CRISPR repeats, crRNAs, tracrRNAs, sgRNA backbones, and sgRNAs provided herein, creating variant proteins and polynucleotides. Changes designed by man may be introduced through the application of site-directed mutagenesis techniques. Alternatively, native, as yet-unknown, or as yet unidentified polynucleotides and/or polypeptides structurally and/or functionally-related to the sequences disclosed herein may also be identified that fall within the scope of the present disclosure. Conservative amino acid substitutions may be made in non-conserved regions that do not alter the function of the RGN proteins. Alternatively, modifications may be made that improve the activity of the RGN.

[0261] Variant polynucleotides and proteins also encompass sequences and proteins derived from a mutagenic and recombinogenic procedure such as DNA shuffling. With such a procedure, one or more different RGN proteins disclosed herein (e.g., SEQ ID NO: 545) is manipulated to create a new RGN protein possessing the desired properties. In this manner, libraries of recombinant polynucleotides are generated from a population of related sequence polynucleotides comprising sequence regions that have substantial sequence identity and can be homologously recombined in vitro or in vivo. For example, using this approach, sequence motifs encoding a domain of interest may be shuffled between the RGN sequences provided herein and other known RGN genes to obtain a new gene coding for a protein with an improved property of interest, such as an increased Kₘ in the case of an enzyme. Strategies for such DNA shuffling are known in the art. See, for example, Stemmer (1994) Proc. Natl. Acad. Sci. USA 91:10747-10751; Stemmer (1994) Nature 370:389-391; Crameri et al. (1997) Nature Biotech. 15:436-438; Moore et al. (1997) J. Mol. Biol. 272:336-347; Zhang et al. (1997) Proc. Natl. Acad. Sci. USA 94:4504-4509; Crameri et al. (1998) Nature 391:288-291; and U.S. Pat. Nos. 5,605,793 and 5,837,458. A “shuffled” nucleic acid is a nucleic acid produced by a shuffling procedure such as any shuffling procedure set forth herein. Shuffled nucleic acids are produced by recombining (physically or virtually) two or more nucleic acids (or character strings), for example in an artificial, and optionally recursive, fashion. Generally, one or more screening steps are used in shuffling processes to identify nucleic acids of interest; this screening step can be performed before or after any recombination step. In some (but not all) shuffling embodiments, it is desirable to perform multiple rounds of recombination prior to selection to increase the diversity of the pool to be screened. The overall process of recombination and selection are optionally repeated recursively. Depending on context, shuffling can refer to an overall process of recombination and selection, or, alternately, can simply refer to the recombinational portions of the overall process.

[0262] As used herein, “sequence identity” or “identity” in the context of two polynucleotides or polypeptide sequences makes reference to the residues in the two sequences that are the same when aligned for maximum correspondence over a specified comparison window. It is recognized that residue positions which are not identical often differ by conservative amino acid substitutions, where amino acid residues are substituted for other amino acid residues with similar chemical properties (e.g., charge or hydrophobicity) and therefore do not change the functional properties of the molecule. Protein sequences that differ by such conservative substitutions are said to have “sequence similarity” or “similarity”. Means for measuring sequence similarity are well known to those of skill in the art. Typically, this involves scoring a conservative substitution as a partial rather than a full mismatch. Thus, for example, where an identical amino acid is given a score of 1 and a non-conservative substitution is given a score of zero, a conservative substitution is given a score between zero and 1. The scoring of conservative substitutions is calculated, e.g., as implemented in the program PC/GENE (Intelligenetics, Mountain View, California).

[0263] As used herein, “percentage of sequence identity” means the value determined by comparing two optimally aligned sequences over a comparison window, wherein the portion of the polynucleotide sequence in the comparison window may comprise additions or deletions (i.e., gaps) as compared to the reference sequence (which does not comprise additions or deletions) for optimal alignment of the two sequences. The percentage is calculated by determining the number of positions at which the identical nucleic acid base or amino acid residue occurs in both sequences to yield the number of matched positions, dividing the number of matched positions by the total number of positions in the window of comparison, and multiplying the result by 100 to yield the percentage of sequence identity.

[0264] Unless otherwise stated, sequence identity/similarity values provided herein refer to the value obtained using GAP Version 10 using the following parameters: % identity and % similarity for a nucleotide sequence using GAP Weight of 50 and Length Weight of 3, and the nwsgapdna.cmp scoring matrix; % identity and % similarity for an amino acid sequence using GAP Weight of 8 and Length Weight of 2, and the BLOSUM62 scoring matrix; or any equivalent program thereof. By “equivalent program” is intended any sequence comparison program that, for any two sequences in question, generates an alignment having identical nucleotide or amino acid residue matches and an identical percent sequence identity when compared to the corresponding alignment generated by GAP Version 10.

[0265] Two sequences are “optimally aligned” when they are aligned for similarity scoring using a defined amino acid substitution matrix (e.g., BLOSUM62), gap existence penalty and gap extension penalty so as to arrive at the highest score possible for that pair of sequences. Amino acid substitution matrices and their use in quantifying the similarity between two sequences are well-known in the art and described, e.g., in Dayhoff et al. (1978) “A model of evolutionary change in proteins.” In “Atlas of Protein Sequence and Structure,” Vol. 5, Suppl. 3 (ed. M. O. Dayhoff), pp. 345-352. Natl. Biomed. Res. Found., Washington, D.C. and Henikoff et al. (1992) Proc. Natl. Acad. Sci. USA 89:10915-10919. The BLOSUM62 matrix is often used as a default scoring substitution matrix in sequence alignment protocols. The gap existence penalty is imposed for the introduction of a single amino acid gap in one of the aligned sequences, and the gap extension penalty is imposed for each additional empty amino acid position inserted into an already opened gap. The alignment is defined by the amino acids positions of each sequence at which the alignment begins and ends, and optionally by the insertion of a gap or multiple gaps in one or both sequences, so as to arrive at the highest possible score. While optimal alignment and scoring can be accomplished manually, the process is facilitated by the use of a computer-implemented alignment algorithm, e.g., gapped BLAST 2.0, described in Altschul et al. (1997) Nucleic Acids Res. 25:3389-3402, and made available to the public at the National Center for Biotechnology Information Website (www.ncbi.nlm.nih.gov). Optimal alignments, including multiple alignments, can be prepared using, e.g., PSI-BLAST, available through www.ncbi.nlm.nih.gov and described by Altschul et al. (1997) Nucleic Acids Res. 25:3389-3402.

[0266] With respect to an amino acid sequence that is optimally aligned with a reference sequence, an amino acid residue “corresponds to” the position in the reference sequence with which the residue is paired in the alignment. The “position” is denoted by a number that sequentially identifies each amino acid in the reference sequence based on its position relative to the N-terminus. Owing to deletions, insertion, truncations, fusions, etc., that must be taken into account when determining an optimal alignment, in general the amino acid residue number in a test sequence as determined by simply counting from the N-terminal will not necessarily be the same as the number of its corresponding position in the reference sequence. For example, in a case where there is a deletion in an aligned test sequence, there will be no amino acid that corresponds to a position in the reference sequence at the site of deletion. Where there is an insertion in an aligned reference sequence, that insertion will not correspond to any amino acid position in the reference sequence. In the case of truncations or fusions there can be stretches of amino acids in either the reference or aligned sequence that do not correspond to any amino acid in the corresponding sequence.

### VII. RGN Systems and Ribonucleoprotein Complexes for Binding a Target Sequence of Interest and Methods of Making the Same

[0267] The present disclosure provides a RGN system for binding a target sequence in the FOXP3 gene. As used herein, an RGN system comprises at least one RGN polypeptide or a polynucleotide comprising a nucleotide sequence encoding the RGN polypeptide and one or more guide RNAs. The one or more guide RNAs are capable of forming a complex with the RGN polypeptide (ribonucleoprotein complex). The presently disclosed RGN systems comprise: a) one or more guide RNAs, or one or more polynucleotides comprising one or more nucleotide sequences encoding the one or more guide RNAs; and b) an RGN polypeptide or a polynucleotide comprising a nucleotide sequence encoding the RGN polypeptide. The one or more guide RNAs are capable of targeting a bound RGN polypeptide to a target sequence. The one or more guide RNAs are capable of forming a complex with the RGN polypeptide to direct the RGN polypeptide to bind to the target sequence in the FOXP3 gene. The guide RNA hybridizes to the target strand of a target sequence in the FOXP3 gene and also forms a complex with the RGN polypeptide, thereby directing the RGN polypeptide to bind to the target sequence. In some embodiments, the target sequence is set forth as any one of SEQ ID NOs: 2, 4, 6, 8, 10, 12, 14, 16, 18, 20, 22, 24, 26, 28, 30, 32, 34, 36, 38, 40, 42, 44, 46, 48, 50, 52, 54, 56, 58, 60, 62, 64, 66, 68, 70, 72, 74, 76, 78, 80, 82, 84, 86, 88, 90, 92, 94, 96, 98, 100, 102, 104, 106, 108, 110, 112, 114, 116, 118, 120, 122, 124, 126, 128, 130, 132, 134, 136, 138, 140, 142, 144, 146, 148, 150, 152, 154, 156, 158, 160, 162, 164, 166, 168, 170, 172, 174, 176, 178, 180, 182, 184, 186, 188, 190, 192, 194, 196, 198, 200, 202, 204, 206, 208, 210, 212, and 214.

[0268] In some embodiments, the target sequence within the FOXP3 gene has the nucleotide sequence set forth as: TGCCAGGCCTGGGGTTGGGCATC (SEQ ID NO: 156). In some embodiments, the target sequence within the FOXP3 gene has the nucleotide sequence set forth as: CAGGTCTGAGGCTTTGGGTGCAG (SEQ ID NO: 164). In some embodiments, the target sequence within the FOXP3 gene has the nucleotide sequence set forth as: TCGAAGATCTCGGCCCTGGAAGG (SEQ ID NO: 180). In some embodiments, the target sequence within the FOXP3 gene has the nucleotide sequence set forth as: TCTCGGCCCTGGAAGGTTCCCCCTG (SEQ ID NO: 190). In some embodiments, the target sequence within the FOXP3 gene has the nucleotide sequence set forth as: GGTTCAAGGAAGAAGAGGAGGCA (SEQ ID NO: 198). In some embodiments, the target sequence within the FOXP3 gene has the nucleotide sequence set forth as:

(SEQ ID NO: 194)
GGGGTTCAAGGAAGAAGAGGAGGCA.

[0269] In some embodiments, the RGN is capable of recognizing a consensus PAM sequence set forth as NNNNCC. In some embodiments, the RGN is capable of recognizing a full PAM sequence set forth as any one of CAACCCCA, AACCCCAG, TTGTCCAA, CAGGCCTG, GGGTCCTT, CAAGCCCT, ATGCCCAA, CCAACCCC, CATGCCAC, GCCACCAT, GGACCCGA, CCTTCCTT, TTGGCCCT, GGGGCCGA, CTCGCCCA, GCACCCAA, CCCTCCAG, CAGCCCTC, GGCCCCCA, GGGCCCCC, GGCCCCGG, AGGGCCGA, TCCCCCTG, TTCCCCCT, GTTCCCCC, GGTTCCCC, GGGGCCCA, CGGCCCTG, GGGCCCAT, TCGGCCCT, CATGCCTC, GCCTCCTC, TCTTCCTT, TGGCCC, CAGACC, TCGGCC, CTTGCC, GGCCCC, GCAGCC, AAGCCC, GCCTCC, GCCACC, ATCCCC, AAAGCC, CCATCC, CCTTCC, TGGGCC, GGGCCC, CGGGCC, AACCCC, TCGCCC, CATGCC, AGGGCC, TGAACC, CCCGCC, TCTTCC, and GGCTCC. In some embodiments, the RGN comprises an amino acid sequence set forth as SEQ ID NO: 545, or an active variant or fragment thereof. In some embodiments, the RGN comprises an amino acid sequence having at least 80% sequence identity to SEQ ID NO: 545. In some embodiments, the guide RNA comprises a CRISPR repeat sequence comprising the nucleotide sequence set forth as any one of SEQ ID NOs: 546, 549-552, 839, 842, 845, 940, 942-945, 1228, 1230, and 1232, or an active variant or fragment thereof. In some embodiments, the guide RNA comprises a CRISPR repeat having the nucleotide sequence set forth as SEQ ID NO: 546, or an active variant or fragment thereof. In some embodiments, the guide RNA comprises a crRNA comprising the nucleotide sequence set forth as any one of SEQ ID NOs: 574-692, and 967-1085, or an active variant or fragment thereof. In some embodiments, the guide RNA comprises a tracrRNA comprising the nucleotide sequence set forth as any one of SEQ ID NOs: 547, 553-562, 840, 842, 846, 941, 946-955, 1229, 1231, and 1233, or an active variant or fragment thereof. In some embodiments, the guide RNA comprises a tracrRNA having the nucleotide sequence set forth as SEQ ID NO: 547, or an active variant or fragment thereof. In some embodiments, the guide RNA comprises an sgRNA backbone comprising any one of the nucleotide sequences set forth as SEQ ID NOs: 563-573, and 956-966. In some embodiments, the guide RNA comprises an sgRNA comprising any one of the nucleotide sequences set forth as SEQ ID NOs: 693-834, and 1086-1227, or an active variant or fragment thereof. In some embodiments, the guide RNA comprises a sgRNA having the nucleotide sequence set forth as SEQ ID NO: 693, or an active variant or fragment thereof. In some embodiments, the guide RNA comprises a sgRNA having the nucleotide sequence set forth as SEQ ID NO: 694, or an active variant or fragment thereof. In some embodiments, the guide RNA comprises a sgRNA having the nucleotide sequence set forth as SEQ ID NO: 695, or an active variant or fragment thereof. In some embodiments, the guide RNA comprises a sgRNA having the nucleotide sequence set forth as SEQ ID NO: 696, or an active variant or fragment thereof. In some embodiments, the guide RNA comprises a sgRNA having the nucleotide sequence set forth as SEQ ID NO: 697, or an active variant or fragment thereof. In some embodiments, the guide RNA comprises a sgRNA having the nucleotide sequence set forth as SEQ ID NO: 698, or an active variant or fragment thereof. The guide RNA of the system can be a single guide RNA or a dual-guide RNA. In some embodiments, the system comprises an RNA-guided nuclease that is heterologous to the guide RNA, wherein the RGN and guide RNA are not found complexed to one another (i.e., bound to one another) in nature.

[0270] The system for binding a target sequence of interest provided herein can be a ribonucleoprotein complex, which is at least one molecule of an RNA bound to at least one protein. The ribonucleoprotein complexes provided herein comprise at least one guide RNA as the RNA component and an RNA-guided nuclease as the protein component. Such ribonucleoprotein complexes can be purified from a cell or organism that naturally expresses an RGN polypeptide and has been engineered to express a particular guide RNA that is specific for a target sequence of interest (e.g., a target sequence in the FOXP3 gene). Alternatively, the ribonucleoprotein complex can be purified from a cell or organism that has been transformed with polynucleotides (e.g., an mRNA) that encode an RGN polypeptide and a guide RNA and cultured under conditions to allow for the expression of the RGN polypeptide and guide RNA. In some embodiments, the ribonucleoprotein complex is purified from a cell or organism that has been transformed with a polynucleotide (e.g., an mRNA) that encodes an RGN polypeptide and wherein a synthetically derived gRNA has been introduced. Thus, methods are provided for making an RGN polypeptide or an RGN ribonucleoprotein complex. Such methods comprise culturing a cell comprising a nucleotide sequence encoding an RGN polypeptide, and in some embodiments a nucleotide sequence encoding a guide RNA, under conditions in which the RGN polypeptide (and in some embodiments, the guide RNA) is expressed. The RGN polypeptide or RGN ribonucleoprotein can then be purified from a lysate of the cultured cells. In some embodiments, the nucleotide sequence encoding an RGN polypeptide includes a mRNA (messenger RNA). In some embodiments, methods for assembling an RNP complex comprise combining one or more of the presently disclosed guide RNAs and one or more of the presently disclosed RGN polypeptides under conditions suitable for formation of the RNP complex.

[0271] Methods for purifying an RGN polypeptide or RGN ribonucleoprotein complex from a lysate of a biological sample are known in the art (e.g., size exclusion and/or affinity chromatography, 2D-PAGE, HPLC, reversed-phase chromatography, immunoprecipitation). In particular methods, the RGN polypeptide is recombinantly produced and comprises a purification tag to aid in its purification, including but not limited to, glutathione-S-transferase (GST), chitin binding protein (CBP), maltose binding protein, thioredoxin (TRX), poly(NANP), tandem affinity purification (TAP) tag, myc, AcV5, AU1, AU5, E, ECS, E2, FLAG (e.g., 3× FLAG tag), HA, nus, Softag 1, Softag 3, Strep, SBP, Glu-Glu, HSV, KT3, S, S1, T7, V5, VSV-G, 6×His, 10×His, biotin carboxyl carrier protein (BCCP), and calmodulin. Generally, the tagged RGN polypeptide or RGN ribonucleoprotein complex is purified using immobilized metal affinity chromatography. It will be appreciated that other similar methods known in the art may be used, including other forms of chromatography or for example immunoprecipitation, either alone or in combination.

[0272] An “isolated” or “purified” polypeptide, or biologically active portion thereof, is substantially or essentially free from components that normally accompany or interact with the polypeptide as found in its naturally occurring environment. Thus, an isolated or purified polypeptide is substantially free of other cellular material, or culture medium when produced by recombinant techniques, or substantially free of chemical precursors or other chemicals when chemically synthesized. A protein that is substantially free of cellular material includes preparations of protein having less than about 30%, 20%, 10%, 5%, or 1% (by dry weight) of contaminating protein. When the protein of the disclosure or biologically active portion thereof is recombinantly produced, optimally culture medium represents less than about 30%, 20%, 10%, 5%, or 1% (by dry weight) of chemical precursors or non-protein-of-interest chemicals. Similarly, an “isolated” polynucleotide or nucleic acid molecule is removed from its naturally occurring environment. An isolated polynucleotide is substantially free of chemical precursors or other chemicals when chemically synthesized or has been removed from a genomic locus via the breaking of phosphodiester bonds. An isolated polynucleotide can be part of a vector, a composition of matter or can be contained within a cell so long as the cell is not the original environment of the polynucleotide.

[0273] Particular methods provided herein for binding and/or cleaving a target sequence of interest involve the use of an in vitro assembled RGN ribonucleoprotein complex. In vitro assembly of an RGN ribonucleoprotein complex can be performed using any method known in the art in which an RGN polypeptide is contacted with a guide RNA under conditions to allow for binding of the RGN polypeptide to the guide RNA. As used herein, “contact”, contacting”, “contacted,” refer to placing the components of a desired reaction together under conditions suitable for carrying out the desired reaction. The RGN polypeptide can be purified from a biological sample, cell lysate, or culture medium, produced via in vitro translation, or chemically synthesized. The guide RNA can be purified from a biological sample, cell lysate, or culture medium, transcribed in vitro, or chemically synthesized. The RGN polypeptide and guide RNA can be brought into contact in solution (e.g., buffered saline solution) to allow for in vitro assembly of the RGN ribonucleoprotein complex.

[0274] Some aspects of this disclosure provide kits comprising one or more elements of an RGN system described herein, including: guide RNAs (i.e. crRNAs, tracrRNAs, and/or sgRNAs), RGNs, and/or polynucleotides encoding the same; cells; and complete RGN systems, and in some embodiments another type of nuclease. In some embodiments, the kit includes suitable reagents, buffers, and/or instructions for using one or more elements of an RGN system, e.g., for in vitro or in vivo nucleic acid editing. Reagents may be provided in any suitable container, such as a vial, a bottle, or a tube. Reagents may be used in a process utilizing one or more of the elements of an RGN system. For example, restriction enzymes may be included for cloning of a polynucleotide encoding an RGN or a guide RNA into a vector. In some embodiments, the kit includes instructions regarding the design and use of suitable guide RNAs (i.e. crRNAs, tracrRNAs, and/or sgRNAs) for targeted editing of a nucleic acid sequence. Reagents may be provided in a form that is usable in a particular assay, or in a form that requires addition of one or more other components before use (e.g. in concentrate or lyophilized form). A buffer can be any buffer, including but not limited to a sodium carbonate buffer, a sodium bicarbonate buffer, a borate buffer, a Tris buffer, a MOPS buffer, a HEPES buffer, and combinations thereof. In some embodiments, the buffer is alkaline. In some embodiments, the buffer has a pH from about 7 to about 10.

[0275] A kit including one or more elements of an RGN system of the disclosure has utility in a wide variety of applications including modifying (e.g., deleting, inserting, translocating, inactivating, activating) a target polynucleotide in a multiplicity of cell types.

[0276] In some embodiments, a kit of the disclosure includes a kit including a pharmaceutical composition described herein. In some embodiments, a kit may include: (a) a container containing a composition of the disclosure in lyophilized form and (b) a second container containing an acceptable diluent (e.g., sterile water) for injection. An acceptable diluent can be used for reconstitution or dilution of the lyophilized compound of the disclosure. Optionally associated with such container(s) can be a notice in the form prescribed by a governmental agency regulating the manufacture, use or sale of biological products.

### VII. Methods of Binding, Cleaving, or Modifying a Target Sequence

[0277] The present disclosure provides methods for binding, cleaving, and/or modifying a target sequence in the FOXP3 gene. The methods include delivering an RGN system comprising at least one guide RNA or a polynucleotide encoding the same, and at least one RGN polypeptide or a polynucleotide encoding the same to the target sequence or a cell or embryo comprising the target sequence. In some embodiments, the target sequence within the FOXP3 gene has a nucleotide sequence set forth as any one of SEQ ID NOs: 2, 4, 6, 8, 10, 12, 14, 16, 18, 20, 22, 24, 26, 28, 30, 32, 34, 36, 38, 40, 42, 44, 46, 48, 50, 52, 54, 56, 58, 60, 62, 64, 66, 68, 70, 72, 74, 76, 78, 80, 82, 84, 86, 88, 90, 92, 94, 96, 98, 100, 102, 104, 106, 108, 110, 112, 114, 116, 118, 120, 122, 124, 126, 128, 130, 132, 134, 136, 138, 140, 142, 144, 146, 148, 150, 152, 154, 156, 158, 160, 162, 164, 166, 168, 170, 172, 174, 176, 178, 180, 182, 184, 186, 188, 190, 192, 194, 196, 198, 200, 202, 204, 206, 208, 210, 212, and 214. In some embodiments, the target sequence within the FOXP3 gene has the nucleotide sequence set forth as SEQ ID NO: 156. In some embodiments, the target sequence within the FOXP3 gene has the nucleotide sequence set forth as SEQ ID NO: 164. In some embodiments, the target sequence within the FOXP3 gene has the nucleotide sequence set forth as SEQ ID NO: 180. In some embodiments, the target sequence within the FOXP3 gene has the nucleotide sequence set forth as SEQ ID NO: 190. In some embodiments, the target sequence within the FOXP3 gene has the nucleotide sequence set forth as SEQ ID NO: 198. In some embodiments, the target sequence within the FOXP3 gene has the nucleotide sequence set forth as SEQ ID NO: 194.

[0278] In some embodiments, the RGN is capable of recognizing a consensus PAM sequence set forth as NNNNCC. In some embodiments, the RGN is capable of recognizing a full PAM sequence set forth as any one of CAACCCCA, AACCCCAG, TTGTCCAA, CAGGCCTG, GGGTCCTT, CAAGCCCT, ATGCCCAA, CCAACCCC, CATGCCAC, GCCACCAT, GGACCCGA, CCTTCCTT, TTGGCCCT, GGGGCCGA, CTCGCCCA, GCACCCAA, CCCTCCAG, CAGCCCTC, GGCCCCCA, GGGCCCCC, GGCCCCGG, AGGGCCGA, TCCCCCTG, TTCCCCCT, GTTCCCCC, GGTTCCCC, GGGGCCCA, CGGCCCTG, GGGCCCAT, TCGGCCCT, CATGCCTC, GCCTCCTC, TCTTCCTT, TGGCCC, CAGACC, TCGGCC, CTTGCC, GGCCCC, GCAGCC, AAGCCC, GCCTCC, GCCACC, ATCCCC, AAAGCC, CCATCC, CCTTCC, TGGGCC, GGGCCC, CGGGCC, AACCCC, TCGCCC, CATGCC, AGGGCC, TGAACC, CCCGCC, TCTTCC, and GGCTCC. The RGN can comprise an amino acid sequence set forth as SEQ ID NO: 545, or an active variant or fragment thereof. In some embodiments, the RGN comprises an amino acid sequence having at least 80% sequence identity to SEQ ID NO: 545. The guide RNA can comprise a CRISPR repeat sequence comprising the nucleotide sequence set forth as any one of SEQ ID NOs: 546, 549-552, 839, 842, 845, 940, 942-945, 1228, 1230, and 1232, or an active variant or fragment thereof. In some embodiments, the guide RNA comprises a CRISPR repeat having the nucleotide sequence set forth as SEQ ID NO: 546, or an active variant or fragment thereof. The guide RNA can comprise a crRNA comprising the nucleotide sequence set forth as any one of SEQ ID NOs: 574-692, and 967-1085, or an active variant or fragment thereof. The guide RNA can comprise a tracrRNA comprising the nucleotide sequence set forth as any one of SEQ ID NOs: 547, 553-562, 840, 842, 846, 941, 946-955, 1229, 1231, and 1233, or an active variant or fragment thereof. In some embodiments, the guide RNA comprises a tracrRNA having the nucleotide sequence set forth as SEQ ID NO: 547, or an active variant or fragment thereof. The guide RNA can comprise an sgRNA backbone comprising any one of the nucleotide sequences set forth as SEQ ID NOs: 563-573, and 956-966, or an active variant or fragment thereof. The guide RNA can comprise an sgRNA comprising any one of the nucleotide sequences set forth as SEQ ID NOs: 693-834, and 1086-1227, or an active variant or fragment thereof. In some embodiments, the guide RNA comprises a sgRNA having the nucleotide sequence set forth as SEQ ID NO: 693, or an active variant or fragment thereof. In some embodiments, the guide RNA comprises a sgRNA having the nucleotide sequence set forth as SEQ ID NO: 694, or an active variant or fragment thereof. In some embodiments, the guide RNA comprises a sgRNA having the nucleotide sequence set forth as SEQ ID NO: 695, or an active variant or fragment thereof. In some embodiments, the guide RNA comprises a sgRNA having the nucleotide sequence set forth as SEQ ID NO: 696, or an active variant or fragment thereof. In some embodiments, the guide RNA comprises a sgRNA having the nucleotide sequence set forth as SEQ ID NO: 697, or an active variant or fragment thereof. In some embodiments, the guide RNA comprises a sgRNA having the nucleotide sequence set forth as SEQ ID NO: 698, or an active variant or fragment thereof. The guide RNA of the system can be a single guide RNA or a dual-guide RNA.

[0279] The RGN of the system may be a nuclease dead RGN, have nickase activity, or may be a fusion polypeptide. In some embodiments, the RGN fusion protein comprises a polypeptide that recruits members of a functional nucleic acid repair complex, such as a member of the nucleotide excision repair (NER) or transcription coupled-nucleotide excision repair (TC-NER) pathway (Wei et al., 2015, PNAS USA 112(27):E3495-504; Troelstra et al., 1992, Cell 71:939-953; Marnef et al., 2017, J Mol Biol 429(9):1277-1288), as described in U.S. Provisional Application No. 62/966,203, which was filed on Jan. 27, 2020, and is incorporated by reference in its entirety. In some embodiments, the RGN fusion protein comprises CSB (van den Boom et al., 2004, J Cell Biol 166(1):27-36; van Gool et al., 1997, EMBO J 16(19):5955-65; an example of which is set forth as SEQ ID NO: 935), which is a member of the TC-NER (nucleotide excision repair) pathway and functions in the recruitment of other members. In further embodiments, the RGN fusion protein comprises an active domain of CSB, such as the acidic domain of CSB which comprises amino acid residues 356-394 of SEQ ID NO: 935 (Teng et al., 2018, Nat Commun 9(1):4115).

[0280] In certain embodiments, the RGN and/or guide RNA is heterologous to the cell or embryo to which the RGN and/or guide RNA (or polynucleotide(s) encoding at least one of the RGN and guide RNA) are introduced.

[0281] In embodiments wherein the method comprises delivering a polynucleotide encoding a guide RNA and/or an RGN polypeptide, the cell or embryo can then be cultured under conditions in which the guide RNA and/or RGN polypeptide are expressed. In some embodiments, the method comprises contacting a target nucleic acid molecule with an RGN ribonucleoprotein complex. The RGN ribonucleoprotein complex may comprise an RGN that is nuclease dead or has nickase activity. In some embodiments, the method comprises introducing into a cell or embryo comprising a target nucleic acid molecule an RGN ribonucleoprotein complex. The RGN ribonucleoprotein complex can be one that has been purified from a biological sample, recombinantly produced and subsequently purified, or in vitro-assembled as described herein. In embodiments wherein the RGN ribonucleoprotein complex that is contacted with the target nucleic acid molecule, or cell or embryo, has been assembled in vitro, the method can further comprise the in vitro assembly of the complex prior to contact with the target nucleic acid molecule, cell or embryo.

[0282] A purified or in vitro assembled RGN ribonucleoprotein complex can be introduced into a cell or embryo using any method known in the art, including, but not limited to electroporation. Alternatively, an RGN polypeptide and/or polynucleotide encoding or comprising the guide RNA can be introduced into a cell or embryo using any method known in the art (e.g., electroporation).

[0283] Upon delivery to or contact with the target nucleic acid molecule or cell or embryo comprising the target nucleic acid molecule, the guide RNA directs the RGN to bind to the target sequence within the target nucleic acid molecule in a sequence-specific manner. In those embodiments wherein the RGN has nuclease activity, the RGN polypeptide cleaves the target sequence upon binding. The target sequence can subsequently be modified via endogenous repair mechanisms, such as non-homologous end joining, or homology-directed repair with a provided donor polynucleotide.

[0284] Methods to measure binding of an RGN polypeptide to a target sequence are known in the art and include chromatin immunoprecipitation assays, gel mobility shift assays, DNA pull-down assays, reporter assays, microplate capture and detection assays. Likewise, methods to measure cleavage or modification of a target nucleic acid molecule comprising a target sequence are known in the art and include in vitro or in vivo cleavage assays wherein cleavage is confirmed using PCR, sequencing, or gel electrophoresis, with or without the attachment of an appropriate label (e.g., radioisotope, fluorescent substance) to the target sequence to facilitate detection of degradation products. Alternatively, the nicking triggered exponential amplification reaction (NTEXPAR) assay can be used (see, e.g., Zhang et al. (2016) Chem. Sci. 7:4951-4957). In vivo cleavage can be evaluated using the Surveyor assay (Guschin et al. (2010) Methods Mol Biol 649:247-256).

[0285] In some embodiments, the methods involve the use of only one RGN and only one of the presently disclosed guide RNAs. In some embodiments, the methods involve the use of a single type of RGN complexed with more than one guide RNA. In some embodiments, the methods involve the use of two types of RGNs, each complexed with a guide RNA. The more than one guide RNA can target different regions of a single gene or can target multiple genes. For example, a first guide RNA can target exon 1 in the FOXP3 gene and a second guide RNA can target intron 1 in the FOXP3 gene.

[0286] In those embodiments wherein a donor polynucleotide is not provided, a double-stranded break introduced by an RGN polypeptide can be repaired by a non-homologous end-joining (NHEJ) repair process. Due to the error-prone nature of NHEJ, repair of the double-stranded break can result in a mutation to the target sequence. In certain embodiments, a “mutation” in reference to a nucleic acid molecule refers to a change in the nucleotide sequence of the nucleic acid molecule, which can be a deletion, insertion, or substitution of one or more nucleotides, or a combination thereof. Mutation of the target nucleic acid molecule comprising a target sequence can result in the expression of an altered protein product or inactivation of a coding sequence.

[0287] The methods can comprise integrating a donor polynucleotide into the FOXP3 gene using an RGN system of the disclosure. In those embodiments wherein a donor polynucleotide is present, the donor sequence in the donor polynucleotide can be integrated into or exchanged with the target nucleotide sequence during the course of repair of the introduced double-stranded break, resulting in the introduction of the exogenous donor sequence. A donor polynucleotide thus comprises a donor sequence that is desired to be introduced into a target sequence of interest (e.g., a target sequence in the FOXP3 gene). In some embodiments, the donor sequence alters the original target nucleotide sequence such that the newly integrated donor sequence will not be recognized and cleaved by the RGN. Integration of the donor sequence can be enhanced by the inclusion within the donor polynucleotide of flanking sequences, referred to herein as “homology arms” that have substantial sequence identity with the sequences flanking the target nucleotide sequence, allowing for a homology-directed repair process. In some embodiments, homology arms have a length of at least 50 base pairs, at least 100 base pairs, and up to 2000 base pairs or more, and have at least 90%, at least 95%, or more, sequence homology to their corresponding sequence within the target nucleotide sequence.

[0288] In those embodiments wherein the RGN polypeptide introduces double-stranded staggered breaks, the donor polynucleotide can comprise a donor sequence flanked by compatible overhangs, allowing for direct ligation of the donor sequence to the cleaved target nucleotide sequence comprising overhangs by a non-homologous repair process during repair of the double-stranded break.

[0289] In those embodiments wherein the method involves the use of an RGN that is a nickase (i.e., is only able to cleave a single strand of a double-stranded polynucleotide), the method can comprise introducing two RGN nickases that target identical or overlapping target sequences and cleave different strands of the polynucleotide. For example, an RGN nickase that only cleaves the positive (+) strand of a double-stranded polynucleotide can be introduced along with a second RGN nickase that only cleaves the negative (−) strand of a double-stranded polynucleotide.

[0290] In some embodiments, a method is provided for binding a target nucleotide sequence and detecting the target sequence, wherein the method comprises introducing into a cell or embryo at least one guide RNA or a polynucleotide encoding the same, and at least one RGN polypeptide or a polynucleotide encoding the same, expressing the guide RNA and/or RGN polypeptide (if coding sequences are introduced), wherein the RGN polypeptide is a nuclease-dead RGN and further comprises a detectable label, and the method further comprises detecting the detectable label. The detectable label may be fused to the RGN as a fusion protein (e.g., fluorescent protein) or may be a small molecule conjugated to or incorporated within the RGN polypeptide that can be detected visually or by other means.

[0291] Also provided herein are methods for modulating the expression of a FOXP3 gene. In some embodiments, the methods comprise modulating expression of a FOXP3 gene in a population of cells. In some embodiments, the population of cells comprises T cells. The method can comprise comprising delivering an RGN system or an RNP complex described herein to the population of cells, wherein the population of cells comprises a target sequence within the FOXP3 gene, and wherein FOXP3 gene expression is modulated as compared to FOXP3 gene expression in a control population of cells. In some embodiments, cleavage or modification of the target sequence occurs. Cleavage or modification of the target sequence can be detected by sequencing. FOXP3 gene expression can be measured by quantitative PCR, microarray, RNA-seq, flow cytometry, immunoblot, enzyme-linked immunosorbent assay (ELISA), protein immunoprecipitation, immunostaining, high performance liquid chromatography (HPLC), liquid chromatography-mass spectrometry (LC/MS), mass spectrometry, or a combination thereof. In some embodiments, FOXP3 gene expression is decreased. The decrease in FOXP3 gene expression can comprise a decrease in FOXP3 mRNA level and/or Foxp3 protein level. In some embodiments, the decrease in FOXP3 mRNA level and/or Foxp3 protein level is due to cleavage of the FOXP3 gene by an RGN system of the disclosure. Cleavage or modification of the target sequence can occur at a rate of 40% to 100%, or 60% to 99%, or 70% to 90%. In some embodiments, cleavage or modification of the target sequence can occur at a rate of at least 30%, at least 35%, at least 40%, at least 45%, at least 50%, at least 55%, at least 60%, at least 65%, at least 70%, at least 75%, at least 80%, at least 85%, at least 90%, at least 95%, at least 96%, at least 97%, at least 98%, at least 99%, or more. In some embodiments, cleavage or modification of the target sequence occurs at a rate of 80% to 100%. The control population of cells can include a population of cells that has not been subjected to the delivering.

[0292] In some embodiments, methods for modulating the expression of a FOXP3 gene comprise introducing into a cell or embryo at least one guide RNA or a polynucleotide encoding the same, and at least one RGN polypeptide or a polynucleotide encoding the same, expressing the guide RNA and/or RGN polypeptide (if coding sequences are introduced), wherein the RGN polypeptide is a nuclease-dead RGN. In some embodiments, the nuclease-dead RGN is a fusion protein comprising an expression modulator as described herein.

[0293] The methods can comprise activation of the FOXP3 gene using an RGN system of the disclosure. In some embodiments, an RGN system can be targeted to the FOXP3 gene to increase or activate expression of the gene. In some embodiments, the increase or activation of the FOXP3 gene is effected by the RGN system directly and in other embodiments the increase or activation of the FOXP3 gene is effected via integration of a donor polynucleotide. The RGN (e.g., a nuclease-dead RGN) or its complexed guide RNA can be operably fused to an expression modulator such that binding of the RGN/guide RNA complex to a target sequence within the FOXP3 gene serves to increase or activate expression of the FOXP3 gene. In some embodiments, the expression modulator comprises a transcriptional activation domain, which interacts with transcriptional control elements and/or transcriptional regulatory proteins, such as RNA polymerases and transcription factors, to increase or activate transcription of the FOXP3 gene. Transcriptional activation domains are known in the art and include, but are not limited to, a herpes simplex virus VP16 activation domain and an NFAT activation domain.

[0294] One of ordinary skill in the art will appreciate that any of the presently disclosed methods can be used to target a single target sequence or multiple target sequences in the FOXP3 gene. Thus, methods comprise the use of a single RGN polypeptide in combination with multiple, distinct guide RNAs, which can target multiple, distinct sequences within the FOXP3 gene.

[0295] In some embodiments, methods of the disclosure are performed ex vivo or in vitro. In some embodiments, methods of the disclosure do not include methods for treatment of the human or animal body by therapy. In some embodiments, methods of the disclosure do not include methods that comprise a process for modifying the germ line genetic identity of human beings or does not comprise a use of human embryos for industrial or commercial purposes.

### IX. Cells Comprising a Polynucleotide Genetic Modification

[0296] Provided herein are cells and organisms comprising a target sequence in the FOXP3 gene that has been modified using a process mediated by an RGN, crRNA, tracrRNA, and/or sgRNA as described herein. In some embodiments, the RGN is capable of recognizing a consensus PAM sequence set forth as NNNNCC. In some embodiments, the RGN is capable of recognizing a full PAM sequence set forth as any one of CAACCCCA, AACCCCAG, TTGTCCAA, CAGGCCTG, GGGTCCTT, CAAGCCCT, ATGCCCAA, CCAACCCC, CATGCCAC, GCCACCAT, GGACCCGA, CCTTCCTT, TTGGCCCT, GGGGCCGA, CTCGCCCA, GCACCCAA, CCCTCCAG, CAGCCCTC, GGCCCCCA, GGGCCCCC, GGCCCCGG, AGGGCCGA, TCCCCCTG, TTCCCCCT, GTTCCCCC, GGTTCCCC, GGGGCCCA, CGGCCCTG, GGGCCCAT, TCGGCCCT, CATGCCTC, GCCTCCTC, TCTTCCTT, TGGCCC, CAGACC, TCGGCC, CTTGCC, GGCCCC, GCAGCC, AAGCCC, GCCTCC, GCCACC, ATCCCC, AAAGCC, CCATCC, CCTTCC, TGGGCC, GGGCCC, CGGGCC, AACCCC, TCGCCC, CATGCC, AGGGCC, TGAACC, CCCGCC, TCTTCC, and GGCTCC. The RGN can comprise an amino acid sequence set forth as SEQ ID NO: 545, or an active variant or fragment thereof. In some embodiments, the RGN comprises an amino acid sequence having at least 80% sequence identity to SEQ ID NO: 545. The guide RNA can comprise a CRISPR repeat sequence comprising the nucleotide sequence set forth as any one of SEQ ID NOs: 546, 549-552, 839, 842, 845, 940, 942-945, 1228, 1230, and 1232, or an active variant or fragment thereof. In some embodiments, the guide RNA comprises a CRISPR repeat having the nucleotide sequence set forth as SEQ ID NO: 546, or an active variant or fragment thereof. The guide RNA can comprise a crRNA comprising the nucleotide sequence set forth as any one of SEQ ID NOs: 574-692, and 967-1085, or an active variant or fragment thereof. The guide RNA can comprise a tracrRNA comprising the nucleotide sequence set forth as any one of SEQ ID NOs: 547, 553-562, 840, 842, 846, 941, 946-955, 1229, 1231, and 1233, or an active variant or fragment thereof. In some embodiments, the guide RNA comprises a tracrRNA having the nucleotide sequence set forth as SEQ ID NO: 547, or an active variant or fragment thereof. The guide RNA can comprise an sgRNA backbone comprising the nucleotide sequence set forth as any one of SEQ ID NOs: 563-573, and 956-966, or an active variant or fragment thereof. The guide RNA can comprise an sgRNA comprising the nucleotide sequences set forth as any one of SEQ ID NOs: 693-834, and 967-1085, or an active variant or fragment thereof. In some embodiments, the guide RNA comprises a sgRNA having the nucleotide sequence set forth as SEQ ID NO: 693, or an active variant or fragment thereof. In some embodiments, the guide RNA comprises a sgRNA having the nucleotide sequence set forth as SEQ ID NO: 694, or an active variant or fragment thereof. In some embodiments, the guide RNA comprises a sgRNA having the nucleotide sequence set forth as SEQ ID NO: 695, or an active variant or fragment thereof. In some embodiments, the guide RNA comprises a sgRNA having the nucleotide sequence set forth as SEQ ID NO: 696, or an active variant or fragment thereof. In some embodiments, the guide RNA comprises a sgRNA having the nucleotide sequence set forth as SEQ ID NO: 697, or an active variant or fragment thereof. In some embodiments, the guide RNA comprises a sgRNA having the nucleotide sequence set forth as SEQ ID NO: 698, or an active variant or fragment thereof. The guide RNA of the system can be a single guide RNA or a dual-guide RNA.

[0297] The modified cells can be eukaryotic (e.g., mammalian, insect, avian cell) or prokaryotic. Prokaryotic cells can be from species, including but not limited to, archaea and bacteria (e.g., Bacillus sp., Klebsiella sp. Streptomyces sp., Rhizobium sp., Escherichia sp., Pseudomonas sp., Salmonella sp., Shigella sp., Vibrio sp., Yersinia sp., Mycoplasma sp., Agrobacterium, Lactobacillus sp.).

[0298] Eukaryotic cells can include cells from animals (e.g., mammals, insects, fish, birds, and reptiles), fungi, amoeba, algae, and yeast. In some embodiments, the cell that is modified by the presently disclosed methods include lymphocytes. In some embodiments, lymphocytes include cytotoxic T cells or regulatory T cells. Cytotoxic T cells recognize and destroy infected, damaged, or cancerous cells and can be identified by various markers including CD8; CD45; CD54; tumor necrosis factor (TNF) alpha, interferon (IFN) gamma, IL-2 CXCR3, and/or TBX21 for Tc1; IL-4, IL-5, CCR4, and/or GATA3 for Tc2; IL-9, IL-10, and/or IRF4 for Tc9; and CCR6, KLRB1, IL-17, IRF4, and/or RORC for Tc17. Regulatory T cells modulate or suppress immune responses by, for example, secreting anti-inflammatory cytokines, expressing inhibitory proteins, and/or inducing apoptosis of effector T cells by cytokine deprivation, and can be identified by various markers including FoxP3, IL-2 receptor alpha (IL2RA or CD25), STAT5A, CTLA4, IL-10, and/or transforming growth factor (TGF) beta. Also provided are embryos comprising at least one FOXP3 gene that has been modified by a process utilizing an RGN, crRNA, tracrRNA, and/or sgRNA as described herein. The genetically modified cells, organisms, and embryos can be heterozygous or homozygous for the modified FOXP3 gene.

[0299] In some embodiments, the chromosomal modification of the cell, organism, or embryo can result in downregulation or abolishment of expression of the FOXP3 mRNA or protein encoded by the FOXP3 gene. In embodiments, the chromosomal modification results in the production of a FOXP3 mRNA that has decreased translation of the Foxp3 protein as compared to a FOXP3 mRNA transcribed from a wild-type FOXP3 gene of a cell, organism, or embryo that has not undergone chromosomal modification. In some embodiments, the chromosomal modification results in the production of a variant Foxp3 protein product that is less stable or reduced in expression as compared to a Foxp3 protein encoded by a wild-type FOXP3 gene of a cell, organism or embryo that has not undergone chromosomal modification. In some embodiments, the expressed variant Foxp3 protein can have at least one amino acid substitution and/or the addition or deletion of at least one amino acid. The variant Foxp3 protein encoded by the altered chromosomal sequence can exhibit modified characteristics or activities when compared to the wild-type Foxp3 protein, including but not limited to altered ability to activate or repress Foxp3 target genes.

[0300] Cells that have been modified may be introduced into an organism. These cells could have originated from the same organism (e.g., person) in the case of autologous cellular transplants, wherein the cells are modified in an ex vivo approach. Alternatively, the cells originated from another organism within the same species (e.g., another person) in the case of allogeneic cellular transplants.

[0301] The article “a” and “an” are used herein to refer to one or more than one (i.e., to at least one) of the grammatical object of the article. By way of example, “a polypeptide” means one or more polypeptides.

[0302] All publications and patent applications mentioned in the specification are indicative of the level of those skilled in the art to which this disclosure pertains. All publications and patent applications are herein incorporated by reference to the same extent as if each individual publication or patent application was specifically and individually indicated to be incorporated by reference.

[0303] Although the foregoing invention has been described in some detail by way of illustration and example for purposes of clarity of understanding, it will be obvious that certain changes and modifications may be practiced within the scope of the appended embodiments.

[0304] Non-limiting embodiments include:
[0305] 1. A guide RNA (gRNA) comprising a CRISPR RNA (crRNA) and a trans-activating CRISPR RNA (tracrRNA), wherein the crRNA comprises
[0306] (i) a crRNA repeat; and
[0307] (ii) a spacer,
   wherein the tracrRNA comprises:
[0308] (iii) an anti-repeat; and
[0309] (iv) a tail,
   wherein the spacer is capable of hybridizing to a target sequence in a forkhead box P3 (FOXP3) gene,
   wherein the target sequence has the nucleotide sequence set forth as any one of SEQ ID NOs: 2, 4, 6, 8, 10, 12, 14, 16, 18, 20, 22, 24, 26, 28, 30, 32, 34, 36, 38, 40, 42, 44, 46, 48, 50, 52, 54, 56, 58, 60, 62, 64, 66, 68, 70, 72, 74, 76, 78, 80, 82, 84, 86, 88, 90, 92, 94, 96, 98, 100, 102, 104, 106, 108, 110, 112, 114, 116, 118, 120, 122, 124, 126, 128, 130, 132, 134, 136, 138, 140, 142, 144, 146, 148, 150, 152, 154, 156, 158, 160, 162, 164, 166, 168, 170, 172, 174, 176, 178, 180, 182, 184, 186, 188, 190, 192, 194, 196, 198, 200, 202, 204, 206, 208, 210, 212, and 214.
[0310] 2. The gRNA of embodiment 1, wherein the spacer has a nucleotide sequence that differs in length and/or sequence from any one of SEQ ID NOs: 1, 3, 5, 7, 9, 11, 13, 15, 17, 19, 21, 23, 25, 27, 29, 31, 33, 35, 37, 39, 41, 43, 45, 47, 49, 51, 53, 55, 57, 59, 61, 63, 65, 67, 69, 71, 73, 75, 77, 79, 81, 83, 85, 87, 89, 91, 93, 95, 97, 99, 101, 103, 105, 107, 109, 111, 113, 115, 117, 119, 121, 123, 125, 127, 129, 131, 133, 135, 137, 139, 141, 143, 145, 147, 149, 151, 153, 155, 157, 159, 161, 163, 165, 167, 169, 171, 173, 175, 177, 179, 181, 183, 185, 187, 189, 191, 193, 195, 197, 199, 201, 203, 205, 207, 209, 211, and 213 by 1 to 5 nucleotides.
[0311] 3. The gRNA of embodiment 2, wherein the spacer has a nucleotide sequence that differs in length and/or sequence from any one of SEQ ID NOs: 1, 3, 5, 7, 9, 11, 13, 15, 17, 19, 21, 23, 25, 27, 29, 31, 33, 35, 37, 39, 41, 43, 45, 47, 49, 51, 53, 55, 57, 59, 61, 63, 65, 67, 69, 71, 73, 75, 77, 79, 81, 83, 85, 87, 89, 91, 93, 95, 97, 99, 101, 103, 105, 107, 109, 111, 113, 115, 117, 119, 121, 123, 125, 127, 129, 131, 133, 135, 137, 139, 141, 143, 145, 147, 149, 151, 153, 155, 157, 159, 161, 163, 165, 167, 169, 171, 173, 175, 177, 179, 181, 183, 185, 187, 189, 191, 193, 195, 197, 199, 201, 203, 205, 207, 209, 211, and 213 by 5 nucleotides.
[0312] 4. The gRNA of embodiment 2, wherein the spacer has a nucleotide sequence that differs in length and/or sequence from any one of SEQ ID NOs: 1, 3, 5, 7, 9, 11, 13, 15, 17, 19, 21, 23, 25, 27, 29, 31, 33, 35, 37, 39, 41, 43, 45, 47, 49, 51, 53, 55, 57, 59, 61, 63, 65, 67, 69, 71, 73, 75, 77, 79, 81, 83, 85, 87, 89, 91, 93, 95, 97, 99, 101, 103, 105, 107, 109, 111, 113, 115, 117, 119, 121, 123, 125, 127, 129, 131, 133, 135, 137, 139, 141, 143, 145, 147, 149, 151, 153, 155, 157, 159, 161, 163, 165, 167, 169, 171, 173, 175, 177, 179, 181, 183, 185, 187, 189, 191, 193, 195, 197, 199, 201, 203, 205, 207, 209, 211, and 213 by 4 nucleotides.
[0313] 5. The gRNA of embodiment 2, wherein the spacer has a nucleotide sequence that differs in length and/or sequence from any one of SEQ ID NOs: 1, 3, 5, 7, 9, 11, 13, 15, 17, 19, 21, 23, 25, 27, 29, 31, 33, 35, 37, 39, 41, 43, 45, 47, 49, 51, 53, 55, 57, 59, 61, 63, 65, 67, 69, 71, 73, 75, 77, 79, 81, 83, 85, 87, 89, 91, 93, 95, 97, 99, 101, 103, 105, 107, 109, 111, 113, 115, 117, 119, 121, 123, 125, 127, 129, 131, 133, 135, 137, 139, 141, 143, 145, 147, 149, 151, 153, 155, 157, 159, 161, 163, 165, 167, 169, 171, 173, 175, 177, 179, 181, 183, 185, 187, 189, 191, 193, 195, 197, 199, 201, 203, 205, 207, 209, 211, and 213 by 3 nucleotides.
[0314] 6. The gRNA of embodiment 2, wherein the spacer has a nucleotide sequence that differs in length and/or sequence from any one of SEQ ID NOs: 1, 3, 5, 7, 9, 11, 13, 15, 17, 19, 21, 23, 25, 27, 29, 31, 33, 35, 37, 39, 41, 43, 45, 47, 49, 51, 53, 55, 57, 59, 61, 63, 65, 67, 69, 71, 73, 75, 77, 79, 81, 83, 85, 87, 89, 91, 93, 95, 97, 99, 101, 103, 105, 107, 109, 111, 113, 115, 117, 119, 121, 123, 125, 127, 129, 131, 133, 135, 137, 139, 141, 143, 145, 147, 149, 151, 153, 155, 157, 159, 161, 163, 165, 167, 169, 171, 173, 175, 177, 179, 181, 183, 185, 187, 189, 191, 193, 195, 197, 199, 201, 203, 205, 207, 209, 211, and 213 by 2 nucleotides.
[0315] 7. The gRNA of embodiment 2, wherein the spacer has a nucleotide sequence that differs in length and/or sequence from any one of SEQ ID NOs: 1, 3, 5, 7, 9, 11, 13, 15, 17, 19, 21, 23, 25, 27, 29, 31, 33, 35, 37, 39, 41, 43, 45, 47, 49, 51, 53, 55, 57, 59, 61, 63, 65, 67, 69, 71, 73, 75, 77, 79, 81, 83, 85, 87, 89, 91, 93, 95, 97, 99, 101, 103, 105, 107, 109, 111, 113, 115, 117, 119, 121, 123, 125, 127, 129, 131, 133, 135, 137, 139, 141, 143, 145, 147, 149, 151, 153, 155, 157, 159, 161, 163, 165, 167, 169, 171, 173, 175, 177, 179, 181, 183, 185, 187, 189, 191, 193, 195, 197, 199, 201, 203, 205, 207, 209, 211, and 213 by 1 nucleotide.
[0316] 8. The gRNA of embodiment 1, wherein the spacer has the nucleotide sequence set forth as any one of SEQ ID NOs: 1, 3, 5, 7, 9, 11, 13, 15, 17, 19, 21, 23, 25, 27, 29, 31, 33, 35, 37, 39, 41, 43, 45, 47, 49, 51, 53, 55, 57, 59, 61, 63, 65, 67, 69, 71, 73, 75, 77, 79, 81, 83, 85, 87, 89, 91, 93, 95, 97, 99, 101, 103, 105, 107, 109, 111, 113, 115, 117, 119, 121, 123, 125, 127, 129, 131, 133, 135, 137, 139, 141, 143, 145, 147, 149, 151, 153, 155, 157, 159, 161, 163, 165, 167, 169, 171, 173, 175, 177, 179, 181, 183, 185, 187, 189, 191, 193, 195, 197, 199, 201, 203, 205, 207, 209, 211, and 213.
[0317] 9. The gRNA of any one of embodiments 1-8, wherein the crRNA repeat has the nucleotide sequence set forth as SEQ ID NO: 546 or a nucleotide sequence that differs in length and/or sequence from SEQ ID NO: 546 by 1 to 8 nucleotides.
[0318] 10. The gRNA of embodiment 9, wherein the crRNA repeat has a nucleotide sequence that differs in length and/or sequence from SEQ ID NO: 546 by 8 nucleotides.
[0319] 11. The gRNA of embodiment 9, wherein the crRNA repeat has a nucleotide sequence that differs in length and/or sequence from SEQ ID NO: 546 by 7 nucleotides.
[0320] 12. The gRNA of embodiment 9, wherein the crRNA repeat has a nucleotide sequence that differs in length and/or sequence from SEQ ID NO: 546 by 6 nucleotides.
[0321] 13. The gRNA of embodiment 9, wherein the crRNA repeat has a nucleotide sequence that differs in length and/or sequence from SEQ ID NO: 546 by 5 nucleotides.
[0322] 14. The gRNA of embodiment 9, wherein the crRNA repeat has a nucleotide sequence that differs in length and/or sequence from SEQ ID NO: 546 by 4 nucleotides.
[0323] 15. The gRNA of embodiment 9, wherein the crRNA repeat has a nucleotide sequence that differs in length and/or sequence from SEQ ID NO: 546 by 3 nucleotides.
[0324] 16. The gRNA of embodiment 9, wherein the crRNA repeat has a nucleotide sequence that differs in length and/or sequence from SEQ ID NO: 546 by 2 nucleotides.
[0325] 17. The gRNA of embodiment 9, wherein the crRNA repeat has a nucleotide sequence that differs in length and/or sequence from SEQ ID NO: 546 by 1 nucleotide.
[0326] 18. The gRNA of embodiment 4, wherein the crRNA repeat has the nucleotide sequence set forth as any one of SEQ ID NOs: 546, 549-552, 839, 842, and 845.
[0327] 19. The gRNA of any one of embodiments 1-9, wherein the crRNA has a nucleotide sequence having at least 80% sequence identity to SEQ ID NOs: 574-692.
[0328] 20. The gRNA of embodiment 19, wherein the crRNA has a nucleotide sequence having at least 90% sequence identity to any one of SEQ ID NOs: 574-692.
[0329] 21. The gRNA of embodiment 19, wherein the crRNA has a nucleotide sequence having at least 95% sequence identity to any one of SEQ ID NOs: 574-692.
[0330] 22. The gRNA of embodiment 19, wherein the crRNA has the nucleotide sequence set forth as any one of SEQ ID NOs: 574-692.
[0331] 23. The gRNA of any one of embodiments 1-9, wherein the tracrRNA has a nucleotide sequence having at least 80% sequence identity to SEQ ID NO: 547.
[0332] 24. The gRNA of embodiment 23, wherein the tracrRNA has a nucleotide sequence having at least 90% sequence identity to SEQ ID NO: 547.
[0333] 25. The gRNA of embodiment 23, wherein the tracrRNA has a nucleotide sequence having at least 95% sequence identity to SEQ ID NO: 547.
[0334] 26. The gRNA of any one of embodiments 1-9, wherein the tracrRNA has a nucleotide sequence that differs in length from SEQ ID NO: 547 by 1 to 16 nucleotides.
[0335] 27. The gRNA of embodiment 26, wherein the tracrRNA has a nucleotide sequence that is 8 nucleotides shorter than SEQ ID NO: 547.
[0336] 28. The gRNA of embodiment 26, wherein the tracrRNA has a nucleotide sequence that is 11 nucleotides shorter than SEQ ID NO: 547.
[0337] 29. The gRNA of any one of embodiments 23-28, wherein the tracrRNA has the nucleotide sequence set forth as any one of SEQ ID NOs: 547, 553-562, 840, 842, and 846.
[0338] 30. The gRNA of any one of embodiments 1-8, wherein the gRNA is a single guide RNA (sgRNA) comprising the crRNA and the tracrRNA linked by a linker, wherein the sgRNA comprises a backbone and the spacer, and wherein the backbone of the sgRNA comprises the crRNA repeat, the linker, and the tracrRNA.
[0339] 31. The gRNA of embodiment 30, wherein the linker has a nucleotide sequence set forth as AAAG, GAAA, ACUU, or CAAAGG.
[0340] 32. The gRNA of embodiment 31, wherein the linker has a nucleotide sequence set forth as AAAG.
[0341] 33. The gRNA of any one of embodiments 30-32, wherein the backbone of the sgRNA comprises a total length of at least 85, 90, 95, 100, 105, 110, 115, or 120 nucleotides.
[0342] 34. The gRNA of any one of embodiments 30-32, wherein the backbone of the sgRNA comprises a total length of at most 85, 90, 95, 100, 105, 110, 115, or 120 nucleotides.
[0343] 35. The gRNA of any one of embodiments 30-32, wherein the backbone of the sgRNA comprises a total length of 86 to 98 nucleotides.
[0344] 36. The gRNA of any one of embodiments 30-32, wherein the backbone of the sgRNA comprises a total length of 94 nucleotides.
[0345] 37. The gRNA of any one of embodiments 30-32, wherein the backbone of the sgRNA has a nucleotide sequence having at least 80% sequence identity to any one of SEQ ID NOs: 563-573.
[0346] 38. The gRNA of embodiment 37, wherein the sgRNA backbone has a nucleotide sequence having at least 90% sequence identity to any one of SEQ ID NOs: 563-573.
[0347] 39. The gRNA of embodiment 37, wherein the sgRNA backbone has a nucleotide sequence having at least 95% sequence identity to any one of SEQ ID NOs: 563-573.
[0348] 40. The gRNA of embodiment 37, wherein the sgRNA backbone has the nucleotide sequence set forth as any one of SEQ ID NOs: 563-573.
[0349] 41. The gRNA of any one of embodiments 1-8, wherein the gRNA comprises a first stem loop formed by hybridization of the crRNA repeat and the anti-repeat, wherein the first stem loop comprises a first stem and a second stem, and wherein the first stem of the first stem loop comprises a total length of at least 3, 4, 5, 6, 7, 8, 9, 10, or 11 base pairs (bp).
[0350] 42. The gRNA of any one of embodiments 1-8, wherein the gRNA comprises a first stem loop formed by hybridization of the crRNA repeat and the anti-repeat, wherein the first stem loop comprises a first stem and a second stem, and wherein the first stem of the first stem loop comprises a total length of at most 3, 4, 5, 6, 7, 8, 9, 10, or 11 bp.
[0351] 43. The gRNA of embodiment 41 or 42, wherein the first stem of the first stem loop comprises a total length of 6 bp.
[0352] 44. The gRNA of embodiment 41 or 42, wherein the first stem of the first stem loop comprises a total length of 3 bp.
[0353] 45. The gRNA of any one of embodiments 1-8, wherein the tail of the tracrRNA comprises a total length of at least 1, 2, 3, 4, 5, 6, or 7 nucleotides.
[0354] 46. The gRNA of any one of embodiments 1-8, wherein the tail of the tracrRNA comprises a total length of at most 1, 2, 3, 4, 5, 6, or 7 nucleotides.
[0355] 47. The gRNA of embodiment 45 or 46, wherein the tail of the tracrRNA comprises a total length of 3 nucleotides.
[0356] 48. The gRNA of embodiment 45 or 46, wherein the tail of the tracrRNA comprises a total length of 1 nucleotide.
[0357] 49. The gRNA of embodiment 41 or 42, wherein the gRNA further comprises a second stem loop most proximal to the tail, wherein the second stem loop comprises a first stem and a second stem.
[0358] 50. The gRNA of embodiment 49, wherein the first stem of the second stem loop comprises a total length of at least 1, 2, 3, 4, 5, or 6 bp.
[0359] 51. The gRNA of embodiment 49, wherein the first stem of the second stem loop comprises a total length of at most 1, 2, 3, 4, 5, or 6 bp.
[0360] 52. The gRNA of embodiment 50 or 51, wherein the first stem of the second stem loop comprises a total length of 5 bp.
[0361] 53. The gRNA of any one of embodiments 49-52, wherein the first stem of the first stem loop comprises a total length of 6 bp, the tail of the tracrRNA comprises a total length of 3 nucleotides, and the first stem of the second stem loop comprises a total length of 5 bp.
[0362] 54. The gRNA of any one of embodiments 1-8, wherein the gRNA is a dual guide RNA (dgRNA).
[0363] 55. The gRNA of embodiment 54, wherein the crRNA repeat of the dgRNA comprises a total length of at least 10, 11, 12, 13, 14, 15, 16, 17, 18, 19, 20, or 21 nucleotides.
[0364] 56. The gRNA of embodiment 54, wherein the crRNA repeat of the dgRNA comprises a total length of at most 10, 11, 12, 13, 14, 15, 16, 17, 18, 19, 20, or 21 nucleotides.
[0365] 57. The gRNA of embodiment 55 or 56, wherein the crRNA repeat of the dgRNA comprises a total length of 13 nucleotides.
[0366] 58. The gRNA of embodiment 55 or 56, wherein the crRNA repeat of the dgRNA comprises a total length of 16 nucleotides.
[0367] 59. The gRNA of embodiment 55 or 56, wherein the crRNA repeat of the dgRNA comprises a total length of 21 nucleotides.
[0368] 60. The gRNA of embodiment 54, wherein the tracrRNA of the dgRNA comprises a total length of at least 65, 70, 75, 80, or 85 nucleotides.
[0369] 61. The gRNA of embodiment 54, wherein the tracrRNA of the dgRNA comprises a total length of at most 65, 70, 75, 80, or 85 nucleotides.
[0370] 62. The gRNA of embodiment 60 or 61, wherein the tracrRNA of the dgRNA comprises a total length of 74 nucleotides.
[0371] 63. The gRNA of embodiment 60 or 61, wherein the tracrRNA of the dgRNA comprises a total length of 77 nucleotides.
[0372] 64. The gRNA of any one of embodiments 1-63, wherein the gRNA comprises a total length of at least 85, 90, 95, 100, 105, 110, 115, 120, 125, 130, or 135 nucleotides.
[0373] 65. The gRNA of any one of embodiments 1-63, wherein the gRNA comprises a total length of at most 85, 90, 95, 100, 105, 110, 115, 120, 125, 130, or 135 nucleotides.
[0374] 66. The gRNA of any one of embodiments 1-63, wherein the gRNA comprises a total length of 106 to 135 nucleotides.
[0375] 67. The gRNA of embodiment 66, wherein the gRNA comprises a total length of 117 to 119 nucleotides.
[0376] 68. The gRNA of any one of embodiments 1-67, wherein the gRNA is capable of targeting a bound RNA-guided nuclease (RGN) polypeptide to the target sequence.
[0377] 69. The gRNA of embodiment 68, wherein the RGN polypeptide is capable of recognizing a consensus protospacer adjacent motif (PAM) having the nucleotide sequence set forth as NNNNCC.
[0378] 70. The gRNA of embodiment 69, wherein the RGN polypeptide is capable of recognizing a full protospacer adjacent motif (PAM) having the nucleotide sequence set forth as any one of CAACCCCA, AACCCCAG, TTGTCCAA, CAGGCCTG, GGGTCCTT, CAAGCCCT, ATGCCCAA, CCAACCCC, CATGCCAC, GCCACCAT, GGACCCGA, CCTTCCTT, TTGGCCCT, GGGGCCGA, CTCGCCCA, GCACCCAA, CCCTCCAG, CAGCCCTC, GGCCCCCA, GGGCCCCC, GGCCCCGG, AGGGCCGA, TCCCCCTG, TTCCCCCT, GTTCCCCC, GGTTCCCC, GGGGCCCA, CGGCCCTG, GGGCCCAT, TCGGCCCT, CATGCCTC, GCCTCCTC, TCTTCCTT, TGGCCC, CAGACC, TCGGCC, CTTGCC, GGCCCC, GCAGCC, AAGCCC, GCCTCC, GCCACC, ATCCCC, AAAGCC, CCATCC, CCTTCC, TGGGCC, GGGCCC, CGGGCC, AACCCC, TCGCCC, CATGCC, AGGGCC, TGAACC, CCCGCC, TCTTCC, and GGCTCC.
[0379] 71. The gRNA of any one of embodiments 68-70, wherein the RGN polypeptide has an amino acid sequence having at least 80% sequence identity to SEQ ID NO: 545; and wherein the target sequence and the spacer are selected from the group consisting of:
[0380] a) a target sequence having the nucleotide sequence set forth as SEQ ID NO: 156 and a spacer having the nucleotide sequence set forth as SEQ ID NO: 155 or a nucleotide sequence that differs in length and/or sequence from SEQ ID NO: 155 by 1 to 5 nucleotides;
[0381] b) a target sequence having the nucleotide sequence set forth as SEQ ID NO: 164 and a spacer having the nucleotide sequence set forth as SEQ ID NO: 163 or a nucleotide sequence that differs in length and/or sequence from SEQ ID NO: 163 by 1 to 5 nucleotides;
[0382] c) a target sequence having the nucleotide sequence set forth as SEQ ID NO: 190 and a spacer having the nucleotide sequence set forth as SEQ ID NO: 189 or a nucleotide sequence that differs in length and/or sequence from SEQ ID NO: 189 by 1 to 5 nucleotides;
[0383] d) a target sequence having the nucleotide sequence set forth as SEQ ID NO: 180 and a spacer having the nucleotide sequence set forth as SEQ ID NO: 179 or a nucleotide sequence that differs in length and/or sequence from SEQ ID NO: 179 by 1 to 5 nucleotides;
[0384] e) a target sequence having the nucleotide sequence set forth as SEQ ID NO: 198 and a spacer having the nucleotide sequence set forth as SEQ ID NO: 197 or a nucleotide sequence that differs in length and/or sequence from SEQ ID NO: 197 by 1 to 5 nucleotides; and
[0385] f) a target sequence having the nucleotide sequence set forth as SEQ ID NO: 194 and a spacer having the nucleotide sequence set forth as SEQ ID NO: 193 or a nucleotide sequence that differs in length and/or sequence from SEQ ID NO: 193 by 1 to 5 nucleotides.
[0386] 72. The gRNA of embodiment 71, wherein the target sequence and the spacer are selected from the group consisting of:
[0387] a) a target sequence having the nucleotide sequence set forth as SEQ ID NO: 156 and a spacer having a nucleotide sequence that differs in length and/or sequence from SEQ ID NO: 155 by 5 nucleotides;
[0388] b) a target sequence having the nucleotide sequence set forth as SEQ ID NO: 164 and a spacer having a nucleotide sequence that differs in length and/or sequence from SEQ ID NO: 163 by 5 nucleotides;
[0389] c) a target sequence having the nucleotide sequence set forth as SEQ ID NO: 190 and a spacer having a nucleotide sequence that differs in length and/or sequence from SEQ ID NO: 189 by 5 nucleotides;
[0390] d) a target sequence having the nucleotide sequence set forth as SEQ ID NO: 180 and a spacer having a nucleotide sequence that differs in length and/or sequence from SEQ ID NO: 179 by 5 nucleotides;
[0391] e) a target sequence having the nucleotide sequence set forth as SEQ ID NO: 198 and a spacer having a nucleotide sequence that differs in length and/or sequence from SEQ ID NO: 197 by 5 nucleotides; and
[0392] f) a target sequence having the nucleotide sequence set forth as SEQ ID NO: 194 and a spacer having a nucleotide sequence that differs in length and/or sequence from SEQ ID NO: 193 by 5 nucleotides.
[0393] 73. The gRNA of embodiment 71, wherein the target sequence and the spacer are selected from the group consisting of:
[0394] a) a target sequence having the nucleotide sequence set forth as SEQ ID NO: 156 and a spacer having a nucleotide sequence that differs in length and/or sequence from SEQ ID NO: 155 by 4 nucleotides;
[0395] b) a target sequence having the nucleotide sequence set forth as SEQ ID NO: 164 and a spacer having a nucleotide sequence that differs in length and/or sequence from SEQ ID NO: 163 by 4 nucleotides;
[0396] c) a target sequence having the nucleotide sequence set forth as SEQ ID NO: 190 and a spacer having a nucleotide sequence that differs in length and/or sequence from SEQ ID NO: 189 by 4 nucleotides;
[0397] d) a target sequence having the nucleotide sequence set forth as SEQ ID NO: 180 and a spacer having a nucleotide sequence that differs in length and/or sequence from SEQ ID NO: 179 by 4 nucleotides;
[0398] e) a target sequence having the nucleotide sequence set forth as SEQ ID NO: 198 and a spacer having a nucleotide sequence that differs in length and/or sequence from SEQ ID NO: 197 by 4 nucleotides; and
[0399] f) a target sequence having the nucleotide sequence set forth as SEQ ID NO: 194 and a spacer having a nucleotide sequence that differs in length and/or sequence from SEQ ID NO: 193 by 4 nucleotides.
[0400] 74. The gRNA of embodiment 71, wherein the target sequence and the spacer are selected from the group consisting of:
[0401] a) a target sequence having the nucleotide sequence set forth as SEQ ID NO: 156 and a spacer having a nucleotide sequence that differs in length and/or sequence from SEQ ID NO: 155 by 3 nucleotides;
[0402] b) a target sequence having the nucleotide sequence set forth as SEQ ID NO: 164 and a spacer having a nucleotide sequence that differs in length and/or sequence from SEQ ID NO: 163 by 3 nucleotides;
[0403] c) a target sequence having the nucleotide sequence set forth as SEQ ID NO: 190 and a spacer having a nucleotide sequence that differs in length and/or sequence from SEQ ID NO: 189 by 3 nucleotides;
[0404] d) a target sequence having the nucleotide sequence set forth as SEQ ID NO: 180 and a spacer having a nucleotide sequence that differs in length and/or sequence from SEQ ID NO: 179 by 3 nucleotides;
[0405] e) a target sequence having the nucleotide sequence set forth as SEQ ID NO: 198 and a spacer having a nucleotide sequence that differs in length and/or sequence from SEQ ID NO: 197 by 3 nucleotides; and
[0406] f) a target sequence having the nucleotide sequence set forth as SEQ ID NO: 194 and a spacer having a nucleotide sequence that differs in length and/or sequence from SEQ ID NO: 193 by 3 nucleotides.
[0407] 75. The gRNA of embodiment 71, wherein the target sequence and the spacer are selected from the group consisting of:
[0408] a) a target sequence having the nucleotide sequence set forth as SEQ ID NO: 156 and a spacer having a nucleotide sequence that differs in length and/or sequence from SEQ ID NO: 155 by 2 nucleotides;
[0409] b) a target sequence having the nucleotide sequence set forth as SEQ ID NO: 164 and a spacer having a nucleotide sequence that differs in length and/or sequence from SEQ ID NO: 163 by 2 nucleotides;
[0410] c) a target sequence having the nucleotide sequence set forth as SEQ ID NO: 190 and a spacer having a nucleotide sequence that differs in length and/or sequence from SEQ ID NO: 189 by 2 nucleotides;
[0411] d) a target sequence having the nucleotide sequence set forth as SEQ ID NO: 180 and a spacer having a nucleotide sequence that differs in length and/or sequence from SEQ ID NO: 179 by 2 nucleotides;
[0412] e) a target sequence having the nucleotide sequence set forth as SEQ ID NO: 198 and a spacer having a nucleotide sequence that differs in length and/or sequence from SEQ ID NO: 197 by 2 nucleotides; and
[0413] f) a target sequence having the nucleotide sequence set forth as SEQ ID NO: 194 and a spacer having a nucleotide sequence that differs in length and/or sequence from SEQ ID NO: 193 by 2 nucleotides.
[0414] 76. The gRNA of embodiment 71, wherein the target sequence and the spacer are selected from the group consisting of:
[0415] a) a target sequence having the nucleotide sequence set forth as SEQ ID NO: 156 and a spacer having a nucleotide sequence that differs in length and/or sequence from SEQ ID NO: 155 by 1 nucleotide;
[0416] b) a target sequence having the nucleotide sequence set forth as SEQ ID NO: 164 and a spacer having a nucleotide sequence that differs in length and/or sequence from SEQ ID NO: 163 by 1 nucleotide;
[0417] c) a target sequence having the nucleotide sequence set forth as SEQ ID NO: 190 and a spacer having a nucleotide sequence that differs in length and/or sequence from SEQ ID NO: 189 by 1 nucleotide;
[0418] d) a target sequence having the nucleotide sequence set forth as SEQ ID NO: 180 and a spacer having a nucleotide sequence that differs in length and/or sequence from SEQ ID NO: 179 by 1 nucleotide;
[0419] e) a target sequence having the nucleotide sequence set forth as SEQ ID NO: 198 and a spacer having a nucleotide sequence that differs in length and/or sequence from SEQ ID NO: 197 by 1 nucleotide; and
[0420] f) a target sequence having the nucleotide sequence set forth as SEQ ID NO: 194 and a spacer having a nucleotide sequence that differs in length and/or sequence from SEQ ID NO: 193 by 1 nucleotide.
[0421] 77. The gRNA of embodiment 71, wherein the spacer has the nucleotide sequence set forth as any one of SEQ ID NOs: 155, 163, 189, 179, 197, and 193.
[0422] 78. The gRNA of any one of embodiments 71-77, wherein the RGN polypeptide has an amino acid sequence having at least 90% sequence identity to SEQ ID NO: 545.
[0423] 79. The gRNA of any one of embodiments 71-77, wherein the RGN polypeptide has an amino acid sequence having at least 95% sequence identity to SEQ ID NO: 545.
[0424] 80. The gRNA of any one of embodiments 71-77, wherein the RGN polypeptide has the amino acid sequence set forth as SEQ ID NO: 545.
[0425] 81. The gRNA of any one of embodiments 68-80, wherein the gRNA has a nucleotide sequence having at least 80% sequence identity to any one of SEQ ID NOs: 693-834.
[0426] 82. The gRNA of embodiment 81, wherein the gRNA has a nucleotide sequence having at least 90% sequence identity to any one of SEQ ID NOs: 693-834.
[0427] 83. The gRNA of embodiment 81, wherein the gRNA has a nucleotide sequence having at least 95% sequence identity to any one of SEQ ID NOs: 693-834.
[0428] 84. The gRNA of embodiment 81, wherein the gRNA has a nucleotide sequence set forth as any one of SEQ ID NOs: 693-834.
[0429] 85. The gRNA of embodiment 84, wherein the gRNA has a nucleotide sequence set forth as any one of SEQ ID NOs: 693, 694, 695, 696, 697, and 698.
[0430] 86. The gRNA of embodiment 70, wherein the RGN polypeptide is capable of recognizing a full PAM having the nucleotide sequence set forth as any one of GGGTCCTT, GGGGCCGA, GGGGCCCA, CGGCCCTG, GGGCCCAT, TGGCCC, TGGGCC, GGGCCC, CGGGCC, and AGGGCC.
[0431] 87. The gRNA of embodiment 86, wherein the RGN polypeptide has an amino acid sequence having at least 80% sequence identity to SEQ ID NO: 835.
[0432] 88. The gRNA of embodiment 87, wherein the RGN polypeptide has an amino acid sequence having at least 90% sequence identity to SEQ ID NO: 835.
[0433] 89. The gRNA of embodiment 87, wherein the RGN polypeptide has an amino acid sequence having at least 95% sequence identity to SEQ ID NO: 835.
[0434] 90. The gRNA of embodiment 87, wherein the RGN polypeptide has the amino acid sequence set forth as SEQ ID NO: 835.
[0435] 91. The gRNA of embodiment 70, wherein the RGN polypeptide is capable of recognizing a full PAM having the nucleotide sequence set forth as any one of TCGGCCCT, CAGGCCTG, TCGGCC, and CGGGCC.
[0436] 92. The gRNA of embodiment 91, wherein the RGN polypeptide has an amino acid sequence having at least 80% sequence identity to SEQ ID NO: 915.
[0437] 93. The gRNA of embodiment 92, wherein the RGN polypeptide has an amino acid sequence having at least 90% sequence identity to SEQ ID NO: 915.
[0438] 94. The gRNA of embodiment 92, wherein the RGN polypeptide has an amino acid sequence having at least 95% sequence identity to SEQ ID NO: 915.
[0439] 95. The gRNA of embodiment 92, wherein the RGN polypeptide has the amino acid sequence set forth as SEQ ID NO: 915.
[0440] 96. The gRNA of any one of embodiments 1-95, wherein the gRNA comprises at least one chemical modification.
[0441] 97. The gRNA of embodiment 96, wherein the at least one chemical modification comprises a bridged nucleic acid (BNA) modification; 2′-O-methyl (2′-O-Me) modification; 2′-O-methoxy-ethyl (2′MOE) modification; 2′-fluoro (2′-F) modification; 2′F-4′Cα-OMe modification; 2′,4′-di-Cα-OMe modification; 2′-O-methyl 3′phosphorothioate (MS) modification; 2′-O-methyl 3′thiophosphonoacetate (MSP) modification; 2′-O-methyl 3′phosphonoacetate (MP) modification; phosphorothioate (PS) modification; or a combination thereof.
[0442] 98. The gRNA of embodiment 97, wherein the at least one chemical modification comprises MS modifications at the 3 terminal nucleotides at the 5′ region and at the 3 terminal nucleotides at the 3′ region of the gRNA.
[0443] 99. The gRNA of embodiment 98, wherein the crRNA repeat has the nucleotide sequence set forth as any one of SEQ ID NOs: 940, 942-945, 1228, 1230, and 1232.
[0444] 100. The gRNA of embodiment 98 or 99, wherein the crRNA has the nucleotide sequence set forth as any one of SEQ ID NOs: 967-1085.
[0445] 101. The gRNA of any one of embodiments 98-100, wherein the tracrRNA has the nucleotide sequence set forth as any one of SEQ ID NOs: 941, 946-955, 1229, 1231, and 1233.
[0446] 102. The gRNA of any one of embodiments 98-101, wherein the gRNA has the nucleotide sequence set forth as any one of SEQ ID NOs: 1086-1227.
[0447] 103. The gRNA of embodiment 97, wherein the BNA comprises a 2′,4′ BNA modification.
[0448] 104. The gRNA of embodiment 103, wherein the 2′,4′ BNA modification is selected from the group consisting of: locked nucleic acid (LNA) modification, BNANC[N-Me]modification, 2′-O,4′-C-ethylene bridged nucleic acid (2′,4′-ENA) modification, and S-constrained ethyl (cEt) modification.
[0449] 105. The gRNA of embodiment 104, wherein the 2′,4′ BNA is a LNA modification.
[0450] 106. The gRNA of embodiment 104, wherein the 2′,4′ BNA is a cEt modification.
[0451] 107. The gRNA of embodiment 97, wherein the at least one chemical modification comprises a BNA modification, 2′-O-Me modification, PS modification, or a combination thereof.
[0452] 108. The gRNA of any one of embodiments 1-107, wherein the gRNA further comprises an extension comprising an edit template for reverse transcriptase (RT) editing.
[0453] 109. A guide RNA (gRNA) comprising a CRISPR RNA (crRNA) and a trans-activating CRISPR RNA (tracrRNA), wherein the crRNA comprises
[0454] (i) a crRNA repeat; and
[0455] (ii) a spacer,
   wherein the tracrRNA comprises:
[0456] (iii) an anti-repeat; and
[0457] (iv) a tail,
   wherein the spacer has the nucleotide sequence set forth as any one of SEQ ID NOs: 1, 3, 5, 7, 9, 11, 13, 15, 17, 19, 21, 23, 25, 27, 29, 31, 33, 35, 37, 39, 41, 43, 45, 47, 49, 51, 53, 55, 57, 59, 61, 63, 65, 67, 69, 71, 73, 75, 77, 79, 81, 83, 85, 87, 89, 91, 93, 95, 97, 99, 101, 103, 105, 107, 109, 111, 113, 115, 117, 119, 121, 123, 125, 127, 129, 131, 133, 135, 137, 139, 141, 143, 145, 147, 149, 151, 153, 155, 157, 159, 161, 163, 165, 167, 169, 171, 173, 175, 177, 179, 181, 183, 185, 187, 189, 191, 193, 195, 197, 199, 201, 203, 205, 207, 209, 211, and 213, or has a nucleotide sequence that differs in length and/or sequence from any one of SEQ ID NOs: 1, 3, 5, 7, 9, 11, 13, 15, 17, 19, 21, 23, 25, 27, 29, 31, 33, 35, 37, 39, 41, 43, 45, 47, 49, 51, 53, 55, 57, 59, 61, 63, 65, 67, 69, 71, 73, 75, 77, 79, 81, 83, 85, 87, 89, 91, 93, 95, 97, 99, 101, 103, 105, 107, 109, 111, 113, 115, 117, 119, 121, 123, 125, 127, 129, 131, 133, 135, 137, 139, 141, 143, 145, 147, 149, 151, 153, 155, 157, 159, 161, 163, 165, 167, 169, 171, 173, 175, 177, 179, 181, 183, 185, 187, 189, 191, 193, 195, 197, 199, 201, 203, 205, 207, 209, 211, and 213 by 1 to 5 nucleotides.
[0458] 110. The gRNA of embodiment 109, wherein the spacer has a nucleotide sequence that differs in length and/or sequence from any one of SEQ ID NOs: 1, 3, 5, 7, 9, 11, 13, 15, 17, 19, 21, 23, 25, 27, 29, 31, 33, 35, 37, 39, 41, 43, 45, 47, 49, 51, 53, 55, 57, 59, 61, 63, 65, 67, 69, 71, 73, 75, 77, 79, 81, 83, 85, 87, 89, 91, 93, 95, 97, 99, 101, 103, 105, 107, 109, 111, 113, 115, 117, 119, 121, 123, 125, 127, 129, 131, 133, 135, 137, 139, 141, 143, 145, 147, 149, 151, 153, 155, 157, 159, 161, 163, 165, 167, 169, 171, 173, 175, 177, 179, 181, 183, 185, 187, 189, 191, 193, 195, 197, 199, 201, 203, 205, 207, 209, 211, and 213 by 5 nucleotides.
[0459] 111. The gRNA of embodiment 109, wherein the spacer has a nucleotide sequence that differs in length and/or sequence from any one of SEQ ID NOs: 1, 3, 5, 7, 9, 11, 13, 15, 17, 19, 21, 23, 25, 27, 29, 31, 33, 35, 37, 39, 41, 43, 45, 47, 49, 51, 53, 55, 57, 59, 61, 63, 65, 67, 69, 71, 73, 75, 77, 79, 81, 83, 85, 87, 89, 91, 93, 95, 97, 99, 101, 103, 105, 107, 109, 111, 113, 115, 117, 119, 121, 123, 125, 127, 129, 131, 133, 135, 137, 139, 141, 143, 145, 147, 149, 151, 153, 155, 157, 159, 161, 163, 165, 167, 169, 171, 173, 175, 177, 179, 181, 183, 185, 187, 189, 191, 193, 195, 197, 199, 201, 203, 205, 207, 209, 211, and 213 by 4 nucleotides.
[0460] 112. The gRNA of embodiment 109, wherein the spacer has a nucleotide sequence that differs in length and/or sequence from any one of SEQ ID NOs: 1, 3, 5, 7, 9, 11, 13, 15, 17, 19, 21, 23, 25, 27, 29, 31, 33, 35, 37, 39, 41, 43, 45, 47, 49, 51, 53, 55, 57, 59, 61, 63, 65, 67, 69, 71, 73, 75, 77, 79, 81, 83, 85, 87, 89, 91, 93, 95, 97, 99, 101, 103, 105, 107, 109, 111, 113, 115, 117, 119, 121, 123, 125, 127, 129, 131, 133, 135, 137, 139, 141, 143, 145, 147, 149, 151, 153, 155, 157, 159, 161, 163, 165, 167, 169, 171, 173, 175, 177, 179, 181, 183, 185, 187, 189, 191, 193, 195, 197, 199, 201, 203, 205, 207, 209, 211, and 213 by 3 nucleotides.
[0461] 113. The gRNA of embodiment 109, wherein the spacer has a nucleotide sequence that differs in length and/or sequence from any one of SEQ ID NOs: 1, 3, 5, 7, 9, 11, 13, 15, 17, 19, 21, 23, 25, 27, 29, 31, 33, 35, 37, 39, 41, 43, 45, 47, 49, 51, 53, 55, 57, 59, 61, 63, 65, 67, 69, 71, 73, 75, 77, 79, 81, 83, 85, 87, 89, 91, 93, 95, 97, 99, 101, 103, 105, 107, 109, 111, 113, 115, 117, 119, 121, 123, 125, 127, 129, 131, 133, 135, 137, 139, 141, 143, 145, 147, 149, 151, 153, 155, 157, 159, 161, 163, 165, 167, 169, 171, 173, 175, 177, 179, 181, 183, 185, 187, 189, 191, 193, 195, 197, 199, 201, 203, 205, 207, 209, 211, and 213 by 2 nucleotides.
[0462] 114. The gRNA of embodiment 109, wherein the spacer has a nucleotide sequence that differs in length and/or sequence from any one of SEQ ID NOs: 1, 3, 5, 7, 9, 11, 13, 15, 17, 19, 21, 23, 25, 27, 29, 31, 33, 35, 37, 39, 41, 43, 45, 47, 49, 51, 53, 55, 57, 59, 61, 63, 65, 67, 69, 71, 73, 75, 77, 79, 81, 83, 85, 87, 89, 91, 93, 95, 97, 99, 101, 103, 105, 107, 109, 111, 113, 115, 117, 119, 121, 123, 125, 127, 129, 131, 133, 135, 137, 139, 141, 143, 145, 147, 149, 151, 153, 155, 157, 159, 161, 163, 165, 167, 169, 171, 173, 175, 177, 179, 181, 183, 185, 187, 189, 191, 193, 195, 197, 199, 201, 203, 205, 207, 209, 211, and 213 by 1 nucleotide.
[0463] 115. The gRNA of embodiment 109, wherein the spacer has the nucleotide sequence set forth as any one of SEQ ID NOs: 1, 3, 5, 7, 9, 11, 13, 15, 17, 19, 21, 23, 25, 27, 29, 31, 33, 35, 37, 39, 41, 43, 45, 47, 49, 51, 53, 55, 57, 59, 61, 63, 65, 67, 69, 71, 73, 75, 77, 79, 81, 83, 85, 87, 89, 91, 93, 95, 97, 99, 101, 103, 105, 107, 109, 111, 113, 115, 117, 119, 121, 123, 125, 127, 129, 131, 133, 135, 137, 139, 141, 143, 145, 147, 149, 151, 153, 155, 157, 159, 161, 163, 165, 167, 169, 171, 173, 175, 177, 179, 181, 183, 185, 187, 189, 191, 193, 195, 197, 199, 201, 203, 205, 207, 209, 211, and 213.
[0464] 116. The gRNA of any one of embodiments 109-115, wherein the spacer is capable of hybridizing to a target sequence set forth as any one of SEQ ID NOs: 2, 4, 6, 8, 10, 12, 14, 16, 18, 20, 22, 24, 26, 28, 30, 32, 34, 36, 38, 40, 42, 44, 46, 48, 50, 52, 54, 56, 58, 60, 62, 64, 66, 68, 70, 72, 74, 76, 78, 80, 82, 84, 86, 88, 90, 92, 94, 96, 98, 100, 102, 104, 106, 108, 110, 112, 114, 116, 118, 120, 122, 124, 126, 128, 130, 132, 134, 136, 138, 140, 142, 144, 146, 148, 150, 152, 154, 156, 158, 160, 162, 164, 166, 168, 170, 172, 174, 176, 178, 180, 182, 184, 186, 188, 190, 192, 194, 196, 198, 200, 202, 204, 206, 208, 210, 212, and 214.
[0465] 117. The gRNA of any one of embodiments 109-116, wherein the crRNA repeat has the nucleotide sequence set forth as SEQ ID NO: 546 or a nucleotide sequence that differs in length and/or sequence from SEQ ID NO: 546 by 1 to 8 nucleotides.
[0466] 118. The gRNA of embodiment 117, wherein the crRNA repeat has a nucleotide sequence that differs in length and/or sequence from SEQ ID NO: 546 by 8 nucleotides.
[0467] 119. The gRNA of embodiment 117, wherein the crRNA repeat has a nucleotide sequence that differs in length and/or sequence from SEQ ID NO: 546 by 7 nucleotides.
[0468] 120. The gRNA of embodiment 117, wherein the crRNA repeat has a nucleotide sequence that differs in length and/or sequence from SEQ ID NO: 546 by 6 nucleotides.
[0469] 121. The gRNA of embodiment 117, wherein the crRNA repeat has a nucleotide sequence that differs in length and/or sequence from SEQ ID NO: 546 by 5 nucleotides.
[0470] 122. The gRNA of embodiment 117, wherein the crRNA repeat has a nucleotide sequence that differs in length and/or sequence from SEQ ID NO: 546 by 4 nucleotides.
[0471] 123. The gRNA of embodiment 117, wherein the crRNA repeat has a nucleotide sequence that differs in length and/or sequence from SEQ ID NO: 546 by 3 nucleotides.
[0472] 124. The gRNA of embodiment 117, wherein the crRNA repeat has a nucleotide sequence that differs in length and/or sequence from SEQ ID NO: 546 by 2 nucleotides.
[0473] 125. The gRNA of embodiment 117, wherein the crRNA repeat has a nucleotide sequence that differs in length and/or sequence from SEQ ID NO: 546 by 1 nucleotide.
[0474] 126. The gRNA of embodiment 117, wherein the crRNA repeat has the nucleotide sequence set forth as any one of SEQ ID NOs: 546, 549-552, 839, 842, and 845.
[0475] 127. The gRNA of any one of embodiments 109-117, wherein the crRNA has a nucleotide sequence having at least 80% sequence identity to SEQ ID NOs: 574-692.
[0476] 128. The gRNA of any one of embodiments 109-117, wherein the crRNA has a nucleotide sequence having at least 90% sequence identity to any one of SEQ ID NOs: 574-692.
[0477] 129. The gRNA of any one of embodiments 109-117, wherein the crRNA has a nucleotide sequence having at least 95% sequence identity to any one of SEQ ID NOs: 574-692.
[0478] 130. The gRNA of any one of embodiments 109-117, wherein the crRNA has the nucleotide sequence set forth as any one of SEQ ID NOs: 574-692.
[0479] 131. The gRNA of any one of embodiments 109-117, wherein the tracrRNA has a nucleotide sequence having at least 80% sequence identity to SEQ ID NO: 547.
[0480] 132. The gRNA of embodiment 131, wherein the tracrRNA has a nucleotide sequence having at least 90% sequence identity to SEQ ID NO: 547.
[0481] 133. The gRNA of embodiment 131, wherein the tracrRNA has a nucleotide sequence having at least 95% sequence identity to SEQ ID NO: 547.
[0482] 134. The gRNA of any one of embodiments 109-117, wherein the tracrRNA has a nucleotide sequence that differs in length from SEQ ID NO: 547 by 1 to 16 nucleotides.
[0483] 135. The gRNA of embodiment 134, wherein the tracrRNA has a nucleotide sequence that is 8 nucleotides shorter than SEQ ID NO: 547.
[0484] 136. The gRNA of embodiment 134, wherein the tracrRNA has a nucleotide sequence that is 11 nucleotides shorter than SEQ ID NO: 547.
[0485] 137. The gRNA of any one of embodiments 131-136, wherein the tracrRNA has the nucleotide sequence set forth as any one of SEQ ID NOs: 547, 553-562, 840, 842, and 846.
[0486] 138. The gRNA of any one of embodiments 109-116, wherein the gRNA is a single guide RNA (sgRNA) comprising the crRNA and the tracrRNA linked by a linker, wherein the sgRNA comprises a backbone and the spacer, and wherein the backbone of the sgRNA comprises the crRNA repeat, the linker, and the tracrRNA.
[0487] 139. The gRNA of embodiment 138, wherein the linker has a nucleotide sequence set forth as AAAG, GAAA, ACUU, or CAAAGG.
[0488] 140. The gRNA of embodiment 139, wherein the linker has a nucleotide sequence set forth as AAAG.
[0489] 141. The gRNA of any one of embodiments 138-140, wherein the backbone of the sgRNA comprises a total length of at least 85, 90, 95, 100, 105, 110, 115, or 120 nucleotides.
[0490] 142. The gRNA of any one of embodiments 138-140, wherein the backbone of the sgRNA comprises a total length of at most 85, 90, 95, 100, 105, 110, 115, or 120 nucleotides.
[0491] 143. The gRNA of any one of embodiments 138-140, wherein the backbone of the sgRNA comprises a total length of 86 to 98 nucleotides.
[0492] 144. The gRNA of any one of embodiments 138-140, wherein the backbone of the sgRNA comprises a total length of 94 nucleotides.
[0493] 145. The gRNA of any one of embodiments 138-140, wherein the backbone of the sgRNA has a nucleotide sequence having at least 80% sequence identity to any one of SEQ ID NOs: 563-573.
[0494] 146. The gRNA of embodiment 145, wherein the sgRNA backbone has a nucleotide sequence having at least 90% sequence identity to any one of SEQ ID NOs: 563-573.
[0495] 147. The gRNA of embodiment 145, wherein the sgRNA backbone has a nucleotide sequence having at least 95% sequence identity to any one of SEQ ID NOs: 563-573.
[0496] 148. The gRNA of embodiment 145, wherein the sgRNA backbone has the nucleotide sequence set forth as any one of SEQ ID NOs: 563-573.
[0497] 149. The gRNA of any one of embodiments 109-116, wherein the gRNA comprises a first stem loop formed by hybridization of the crRNA repeat and the anti-repeat, wherein the first stem loop comprises a first stem and a second stem, and wherein the first stem of the first stem loop comprises a total length of at least 3, 4, 5, 6, 7, 8, 9, 10, or 11 base pairs (bp).
[0498] 150. The gRNA of any one of embodiments 109-116, wherein the gRNA comprises a first stem loop formed by hybridization of the crRNA repeat and the anti-repeat, wherein the first stem loop comprises a first stem and a second stem, and wherein the first stem of the first stem loop comprises a total length of at most 3, 4, 5, 6, 7, 8, 9, 10, or 11 bp.
[0499] 151. The gRNA of embodiment 149 or 150, wherein the first stem of the first stem loop comprises a total length of 6 bp.
[0500] 152. The gRNA of embodiment 149 or 150, wherein the first stem of the first stem loop comprises a total length of 3 bp.
[0501] 153. The gRNA of any one of embodiments 109-116, wherein the tail of the tracrRNA comprises a total length of at least 1, 2, 3, 4, 5, 6, or 7 nucleotides.
[0502] 154. The gRNA of any one of embodiments 109-116, wherein the tail of the tracrRNA comprises a total length of at most 1, 2, 3, 4, 5, 6, or 7 nucleotides.
[0503] 155. The gRNA of embodiment 153 or 154, wherein the tail of the tracrRNA comprises a total length of 3 nucleotides.
[0504] 156. The gRNA of embodiment 153 or 154, wherein the tail of the tracrRNA comprises a total length of 1 nucleotide.
[0505] 157. The gRNA of embodiment 149 or 150, wherein the gRNA further comprises a second stem loop most proximal to the tail, wherein the second stem loop comprises a first stem and a second stem.
[0506] 158. The gRNA of embodiment 157, wherein the first stem of the second stem loop comprises a total length of at least 1, 2, 3, 4, 5, or 6 bp.
[0507] 159. The gRNA of embodiment 157, wherein the first stem of the second stem loop comprises a total length of at most 1, 2, 3, 4, 5, or 6 bp.
[0508] 160. The gRNA of embodiment 158 or 159, wherein the first stem of the second stem loop comprises a total length of 5 bp.
[0509] 161. The gRNA of any one of embodiments 157-160, wherein the first stem of the first stem loop comprises a total length of 6 bp, the tail of the tracrRNA comprises a total length of 3 nucleotides, and the first stem of the second stem loop comprises a total length of 5 bp.
[0510] 162. The gRNA of any one of embodiments 109-116, wherein the gRNA is a dual guide RNA (dgRNA).
[0511] 163. The gRNA of embodiment 162, wherein the crRNA repeat of the dgRNA comprises a total length of at least 10, 11, 12, 13, 14, 15, 16, 17, 18, 19, 20, or 21 nucleotides.
[0512] 164. The gRNA of embodiment 162, wherein the crRNA repeat of the dgRNA comprises a total length of at most 10, 11, 12, 13, 14, 15, 16, 17, 18, 19, 20, or 21 nucleotides.
[0513] 165. The gRNA of embodiment 163 or 164, wherein the crRNA repeat of the dgRNA comprises a total length of 13 nucleotides.
[0514] 166. The gRNA of embodiment 163 or 164, wherein the crRNA repeat of the dgRNA comprises a total length of 16 nucleotides.
[0515] 167. The gRNA of embodiment 163 or 164, wherein the crRNA repeat of the dgRNA comprises a total length of 21 nucleotides.
[0516] 168. The gRNA of embodiment 162, wherein the tracrRNA of the dgRNA comprises a total length of at least 65, 70, 75, 80, or 85 nucleotides.
[0517] 169. The gRNA of embodiment 162, wherein the tracrRNA of the dgRNA comprises a total length of at most 65, 70, 75, 80, or 85 nucleotides.
[0518] 170. The gRNA of embodiment 168 or 169, wherein the tracrRNA of the dgRNA comprises a total length of 74 nucleotides.
[0519] 171. The gRNA of embodiment 168 or 169, wherein the tracrRNA of the dgRNA comprises a total length of 77 nucleotides.
[0520] 172. The gRNA of any one of embodiments 109-171, wherein the gRNA comprises a total length of at least 85, 90, 95, 100, 105, 110, 115, 120, 125, 130, or 135 nucleotides.
[0521] 173. The gRNA of any one of embodiments 109-171, wherein the gRNA comprises a total length of at most 85, 90, 95, 100, 105, 110, 115, 120, 125, 130, or 135 nucleotides.
[0522] 174. The gRNA of any one of embodiments 109-171, wherein the gRNA comprises a total length of 106 to 135 nucleotides.
[0523] 175. The gRNA of embodiment 174, wherein the gRNA comprises a total length of 117 to 119 nucleotides.
[0524] 176. The gRNA of any one of embodiments 109-175, wherein the gRNA is capable of targeting a bound RNA-guided nuclease (RGN) polypeptide to the target sequence.
[0525] 177. The gRNA of embodiment 176, wherein the RGN polypeptide is capable of recognizing a consensus protospacer adjacent motif (PAM) having the nucleotide sequence set forth as NNNNCC.
[0526] 178. The gRNA of embodiment 177, wherein the RGN polypeptide is capable of recognizing a full protospacer adjacent motif (PAM) having the nucleotide sequence set forth as any one of CAACCCCA, AACCCCAG, TTGTCCAA, CAGGCCTG, GGGTCCTT, CAAGCCCT, ATGCCCAA, CCAACCCC, CATGCCAC, GCCACCAT, GGACCCGA, CCTTCCTT, TTGGCCCT, GGGGCCGA, CTCGCCCA, GCACCCAA, CCCTCCAG, CAGCCCTC, GGCCCCCA, GGGCCCCC, GGCCCCGG, AGGGCCGA, TCCCCCTG, TTCCCCCT, GTTCCCCC, GGTTCCCC, GGGGCCCA, CGGCCCTG, GGGCCCAT, TCGGCCCT, CATGCCTC, GCCTCCTC, TCTTCCTT, TGGCCC, CAGACC, TCGGCC, CTTGCC, GGCCCC, GCAGCC, AAGCCC, GCCTCC, GCCACC, ATCCCC, AAAGCC, CCATCC, CCTTCC, TGGGCC, GGGCCC, CGGGCC, AACCCC, TCGCCC, CATGCC, AGGGCC, TGAACC, CCCGCC, TCTTCC, and GGCTCC.
[0527] 179. The gRNA of any one of embodiments 176-178, wherein the RGN polypeptide has an amino acid sequence having at least 80% sequence identity to SEQ ID NO: 545; and wherein the target sequence and the spacer are selected from the group consisting of:
[0528] a) a target sequence having the nucleotide sequence set forth as SEQ ID NO: 156 and a spacer having the nucleotide sequence set forth as SEQ ID NO: 155 or a nucleotide sequence that differs in length and/or sequence from SEQ ID NO: 155 by 1 to 5 nucleotides;
[0529] b) a target sequence having the nucleotide sequence set forth as SEQ ID NO: 164 and a spacer having the nucleotide sequence set forth as SEQ ID NO: 163 or a nucleotide sequence that differs in length and/or sequence from SEQ ID NO: 163 by 1 to 5 nucleotides;
[0530] c) a target sequence having the nucleotide sequence set forth as SEQ ID NO: 190 and a spacer having the nucleotide sequence set forth as SEQ ID NO: 189 or a nucleotide sequence that differs in length and/or sequence from SEQ ID NO: 189 by 1 to 5 nucleotides;
[0531] d) a target sequence having the nucleotide sequence set forth as SEQ ID NO: 180 and a spacer having the nucleotide sequence set forth as SEQ ID NO: 179 or a nucleotide sequence that differs in length and/or sequence from SEQ ID NO: 179 by 1 to 5 nucleotides;
[0532] e) a target sequence having the nucleotide sequence set forth as SEQ ID NO: 198 and a spacer having the nucleotide sequence set forth as SEQ ID NO: 197 or a nucleotide sequence that differs in length and/or sequence from SEQ ID NO: 197 by 1 to 5 nucleotides; and
[0533] f) a target sequence having the nucleotide sequence set forth as SEQ ID NO: 194 and a spacer having the nucleotide sequence set forth as SEQ ID NO: 193 or a nucleotide sequence that differs in length and/or sequence from SEQ ID NO: 193 by 1 to 5 nucleotides.
[0534] 180. The gRNA of embodiment 179, wherein the target sequence and the spacer are selected from the group consisting of:
[0535] a) a target sequence having the nucleotide sequence set forth as SEQ ID NO: 156 and a spacer having a nucleotide sequence that differs in length and/or sequence from SEQ ID NO: 155 by 5 nucleotides;
[0536] b) a target sequence having the nucleotide sequence set forth as SEQ ID NO: 164 and a spacer having a nucleotide sequence that differs in length and/or sequence from SEQ ID NO: 163 by 5 nucleotides;
[0537] c) a target sequence having the nucleotide sequence set forth as SEQ ID NO: 190 and a spacer having a nucleotide sequence that differs in length and/or sequence from SEQ ID NO: 189 by 5 nucleotides;
[0538] d) a target sequence having the nucleotide sequence set forth as SEQ ID NO: 180 and a spacer having a nucleotide sequence that differs in length and/or sequence from SEQ ID NO: 179 by 5 nucleotides;
[0539] e) a target sequence having the nucleotide sequence set forth as SEQ ID NO: 198 and a spacer having a nucleotide sequence that differs in length and/or sequence from SEQ ID NO: 197 by 5 nucleotides; and
[0540] f) a target sequence having the nucleotide sequence set forth as SEQ ID NO: 194 and a spacer having a nucleotide sequence that differs in length and/or sequence from SEQ ID NO: 193 by 5 nucleotides.
[0541] 181. The gRNA of embodiment 179, wherein the target sequence and the spacer are selected from the group consisting of:
[0542] a) a target sequence having the nucleotide sequence set forth as SEQ ID NO: 156 and a spacer having a nucleotide sequence that differs in length and/or sequence from SEQ ID NO: 155 by 4 nucleotides;
[0543] b) a target sequence having the nucleotide sequence set forth as SEQ ID NO: 164 and a spacer having a nucleotide sequence that differs in length and/or sequence from SEQ ID NO: 163 by 4 nucleotides;
[0544] c) a target sequence having the nucleotide sequence set forth as SEQ ID NO: 190 and a spacer having a nucleotide sequence that differs in length and/or sequence from SEQ ID NO: 189 by 4 nucleotides;
[0545] d) a target sequence having the nucleotide sequence set forth as SEQ ID NO: 180 and a spacer having a nucleotide sequence that differs in length and/or sequence from SEQ ID NO: 179 by 4 nucleotides;
[0546] e) a target sequence having the nucleotide sequence set forth as SEQ ID NO: 198 and a spacer having a nucleotide sequence that differs in length and/or sequence from SEQ ID NO: 197 by 4 nucleotides; and
[0547] f) a target sequence having the nucleotide sequence set forth as SEQ ID NO: 194 and a spacer having a nucleotide sequence that differs in length and/or sequence from SEQ ID NO: 193 by 4 nucleotides.
[0548] 182. The gRNA of embodiment 179, wherein the target sequence and the spacer are selected from the group consisting of:
[0549] a) a target sequence having the nucleotide sequence set forth as SEQ ID NO: 156 and a spacer having a nucleotide sequence that differs in length and/or sequence from SEQ ID NO: 155 by 3 nucleotides;
[0550] b) a target sequence having the nucleotide sequence set forth as SEQ ID NO: 164 and a spacer having a nucleotide sequence that differs in length and/or sequence from SEQ ID NO: 163 by 3 nucleotides;
[0551] c) a target sequence having the nucleotide sequence set forth as SEQ ID NO: 190 and a spacer having a nucleotide sequence that differs in length and/or sequence from SEQ ID NO: 189 by 3 nucleotides;
[0552] d) a target sequence having the nucleotide sequence set forth as SEQ ID NO: 180 and a spacer having a nucleotide sequence that differs in length and/or sequence from SEQ ID NO: 179 by 3 nucleotides;
[0553] e) a target sequence having the nucleotide sequence set forth as SEQ ID NO: 198 and a spacer having a nucleotide sequence that differs in length and/or sequence from SEQ ID NO: 197 by 3 nucleotides; and
[0554] f) a target sequence having the nucleotide sequence set forth as SEQ ID NO: 194 and a spacer having a nucleotide sequence that differs in length and/or sequence from SEQ ID NO: 193 by 3 nucleotides.
[0555] 183. The gRNA of embodiment 179, wherein the target sequence and the spacer are selected from the group consisting of:
[0556] a) a target sequence having the nucleotide sequence set forth as SEQ ID NO: 156 and a spacer having a nucleotide sequence that differs in length and/or sequence from SEQ ID NO: 155 by 2 nucleotides;
[0557] b) a target sequence having the nucleotide sequence set forth as SEQ ID NO: 164 and a spacer having a nucleotide sequence that differs in length and/or sequence from SEQ ID NO: 163 by 2 nucleotides;
[0558] c) a target sequence having the nucleotide sequence set forth as SEQ ID NO: 190 and a spacer having a nucleotide sequence that differs in length and/or sequence from SEQ ID NO: 189 by 2 nucleotides;
[0559] d) a target sequence having the nucleotide sequence set forth as SEQ ID NO: 180 and a spacer having a nucleotide sequence that differs in length and/or sequence from SEQ ID NO: 179 by 2 nucleotides;
[0560] e) a target sequence having the nucleotide sequence set forth as SEQ ID NO: 198 and a spacer having a nucleotide sequence that differs in length and/or sequence from SEQ ID NO: 197 by 2 nucleotides; and
[0561] f) a target sequence having the nucleotide sequence set forth as SEQ ID NO: 194 and a spacer having a nucleotide sequence that differs in length and/or sequence from SEQ ID NO: 193 by 2 nucleotides.
[0562] 184. The gRNA of embodiment 179, wherein the target sequence and the spacer are selected from the group consisting of:
[0563] a) a target sequence having the nucleotide sequence set forth as SEQ ID NO: 156 and a spacer having a nucleotide sequence that differs in length and/or sequence from SEQ ID NO: 155 by 1 nucleotide;
[0564] b) a target sequence having the nucleotide sequence set forth as SEQ ID NO: 164 and a spacer having a nucleotide sequence that differs in length and/or sequence from SEQ ID NO: 163 by 1 nucleotide;
[0565] c) a target sequence having the nucleotide sequence set forth as SEQ ID NO: 190 and a spacer having a nucleotide sequence that differs in length and/or sequence from SEQ ID NO: 189 by 1 nucleotide;
[0566] d) a target sequence having the nucleotide sequence set forth as SEQ ID NO: 180 and a spacer having a nucleotide sequence that differs in length and/or sequence from SEQ ID NO: 179 by 1 nucleotide;
[0567] e) a target sequence having the nucleotide sequence set forth as SEQ ID NO: 198 and a spacer having a nucleotide sequence that differs in length and/or sequence from SEQ ID NO: 197 by 1 nucleotide; and
[0568] f) a target sequence having the nucleotide sequence set forth as SEQ ID NO: 194 and a spacer having a nucleotide sequence that differs in length and/or sequence from SEQ ID NO: 193 by 1 nucleotide.
[0569] 185. The gRNA of embodiment 179, wherein the spacer has the nucleotide sequence set forth as any one of SEQ ID NOs: 155, 163, 189, 179, 197, and 193.
[0570] 186. The gRNA of any one of embodiments 179-185, wherein the RGN polypeptide has an amino acid sequence having at least 90% sequence identity to SEQ ID NO: 545.
[0571] 187. The gRNA of any one of embodiments 179-185, wherein the RGN polypeptide has an amino acid sequence having at least 95% sequence identity to SEQ ID NO: 545.
[0572] 188. The gRNA of any one of embodiments 179-185, wherein the RGN polypeptide has the amino acid sequence set forth as SEQ ID NO: 545.
[0573] 189. The gRNA of any one of embodiments 176-188, wherein the gRNA has a nucleotide sequence having at least 80% sequence identity to any one of SEQ ID NOs: 693-834.
[0574] 190. The gRNA of embodiment 189, wherein the gRNA has a nucleotide sequence having at least 90% sequence identity to any one of SEQ ID NOs: 693-834.
[0575] 191. The gRNA of embodiment 189, wherein the gRNA has a nucleotide sequence having at least 95% sequence identity to any one of SEQ ID NOs: 693-834.
[0576] 192. The gRNA of embodiment 189, wherein the gRNA has a nucleotide sequence set forth as any one of SEQ ID NOs: 693-834.
[0577] 193. The gRNA of embodiment 192, wherein the gRNA has a nucleotide sequence set forth as any one of SEQ ID NOs: 693, 694, 695, 696, 697, and 698.
[0578] 194. The gRNA of embodiment 178, wherein the RGN polypeptide is capable of recognizing a full PAM having the nucleotide sequence set forth as any one of GGGTCCTT, GGGGCCGA, GGGGCCCA, CGGCCCTG, GGGCCCAT, TGGCCC, TGGGCC, GGGCCC, CGGGCC, and AGGGCC.
[0579] 195. The gRNA of embodiment 194, wherein the RGN polypeptide has an amino acid sequence having at least 80% sequence identity to SEQ ID NO: 835.
[0580] 196. The gRNA of embodiment 195, wherein the RGN polypeptide has an amino acid sequence having at least 90% sequence identity to SEQ ID NO: 835.
[0581] 197. The gRNA of embodiment 195, wherein the RGN polypeptide has an amino acid sequence having at least 95% sequence identity to SEQ ID NO: 835.
[0582] 198. The gRNA of embodiment 195, wherein the RGN polypeptide has the amino acid sequence set forth as SEQ ID NO: 835.
[0583] 199. The gRNA of embodiment 178, wherein the RGN polypeptide is capable of recognizing a full PAM having the nucleotide sequence set forth as any one of TCGGCCCT, CAGGCCTG, TCGGCC, and CGGGCC.
[0584] 200. The gRNA of embodiment 199, wherein the RGN polypeptide has an amino acid sequence having at least 80% sequence identity to SEQ ID NO: 915.
[0585] 201. The gRNA of embodiment 200, wherein the RGN polypeptide has an amino acid sequence having at least 90% sequence identity to SEQ ID NO: 915.
[0586] 202. The gRNA of embodiment 200, wherein the RGN polypeptide has an amino acid sequence having at least 95% sequence identity to SEQ ID NO: 915.
[0587] 203. The gRNA of embodiment 200, wherein the RGN polypeptide has the amino acid sequence set forth as SEQ ID NO: 915.
[0588] 204. The gRNA of any one of embodiments 109-203, wherein the gRNA comprises at least one chemical modification.
[0589] 205. The gRNA of embodiment 204, wherein the at least one chemical modification comprises a bridged nucleic acid (BNA) modification; 2′-O-methyl (2′-O-Me) modification; 2′-O-methoxy-ethyl (2′MOE) modification; 2′-fluoro (2′-F) modification; 2′F-4′Cα-OMe modification; 2′,4′-di-Cα-OMe modification; 2′-O-methyl 3′phosphorothioate (MS) modification; 2′-O-methyl 3′thiophosphonoacetate (MSP) modification; 2′-O-methyl 3′phosphonoacetate (MP) modification; phosphorothioate (PS) modification; or a combination thereof.
[0590] 206. The gRNA of embodiment 205, wherein the at least one chemical modification comprises MS modifications at the 3 terminal nucleotides at the 5′ region and at the 3 terminal nucleotides at the 3′ region of the gRNA.
[0591] 207. The gRNA of embodiment 206, wherein the crRNA repeat has the nucleotide sequence set forth as any one of SEQ ID NOs: 940, 942-945, 1228, 1230, and 1232.
[0592] 208. The gRNA of embodiment 206 or 207, wherein the crRNA has the nucleotide sequence set forth as any one of SEQ ID NOs: 967-1085.
[0593] 209. The gRNA of any one of embodiments 206-208, wherein the tracrRNA has the nucleotide sequence set forth as any one of SEQ ID NOs: 941, 946-955, 1229, 1231, and 1233.
[0594] 210. The gRNA of any one of embodiments 206-209, wherein the gRNA has the nucleotide sequence set forth as any one of SEQ ID NOs: 1086-1227.
[0595] 211. The gRNA of embodiment 205, wherein the BNA comprises a 2′,4′ BNA modification.
[0596] 212. The gRNA of embodiment 211, wherein the 2′,4′ BNA modification is selected from the group consisting of: locked nucleic acid (LNA) modification, BNANC[N-Me]modification, 2′-O,4′-C-ethylene bridged nucleic acid (2′,4′-ENA) modification, and S-constrained ethyl (cEt) modification.
[0597] 213. The gRNA of embodiment 212, wherein the 2′,4′ BNA is a LNA modification.
[0598] 214. The gRNA of embodiment 212, wherein the 2′,4′ BNA is a cEt modification.
[0599] 215. The gRNA of embodiment 205, wherein the at least one chemical modification comprises a BNA modification, 2′-O-Me modification, PS modification, or a combination thereof.
[0600] 216. The gRNA of any one of embodiments 109-215, wherein the gRNA further comprises an extension comprising an edit template for reverse transcriptase (RT) editing.
[0601] 217. A nucleic acid molecule comprising a CRISPR RNA (crRNA) or encoding a crRNA, wherein the crRNA comprises a spacer and a crRNA repeat, wherein the spacer is capable of hybridizing to a target sequence, and wherein the target sequence in a forkhead box P3 (FOXP3) gene has the nucleotide sequence set forth as any one of SEQ ID NOs: 2, 4, 6, 8, 10, 12, 14, 16, 18, 20, 22, 24, 26, 28, 30, 32, 34, 36, 38, 40, 42, 44, 46, 48, 50, 52, 54, 56, 58, 60, 62, 64, 66, 68, 70, 72, 74, 76, 78, 80, 82, 84, 86, 88, 90, 92, 94, 96, 98, 100, 102, 104, 106, 108, 110, 112, 114, 116, 118, 120, 122, 124, 126, 128, 130, 132, 134, 136, 138, 140, 142, 144, 146, 148, 150, 152, 154, 156, 158, 160, 162, 164, 166, 168, 170, 172, 174, 176, 178, 180, 182, 184, 186, 188, 190, 192, 194, 196, 198, 200, 202, 204, 206, 208, 210, 212, and 214.
[0602] 218. The nucleic acid molecule of embodiment 217, wherein the spacer has a nucleotide sequence that differs in length and/or sequence from any one of SEQ ID NOs: 1, 3, 5, 7, 9, 11, 13, 15, 17, 19, 21, 23, 25, 27, 29, 31, 33, 35, 37, 39, 41, 43, 45, 47, 49, 51, 53, 55, 57, 59, 61, 63, 65, 67, 69, 71, 73, 75, 77, 79, 81, 83, 85, 87, 89, 91, 93, 95, 97, 99, 101, 103, 105, 107, 109, 111, 113, 115, 117, 119, 121, 123, 125, 127, 129, 131, 133, 135, 137, 139, 141, 143, 145, 147, 149, 151, 153, 155, 157, 159, 161, 163, 165, 167, 169, 171, 173, 175, 177, 179, 181, 183, 185, 187, 189, 191, 193, 195, 197, 199, 201, 203, 205, 207, 209, 211, and 213 by 1 to 5 nucleotides.
[0603] 219. The nucleic acid molecule of embodiment 218, wherein the spacer has a nucleotide sequence that differs in length and/or sequence from any one of SEQ ID NOs: 1, 3, 5, 7, 9, 11, 13, 15, 17, 19, 21, 23, 25, 27, 29, 31, 33, 35, 37, 39, 41, 43, 45, 47, 49, 51, 53, 55, 57, 59, 61, 63, 65, 67, 69, 71, 73, 75, 77, 79, 81, 83, 85, 87, 89, 91, 93, 95, 97, 99, 101, 103, 105, 107, 109, 111, 113, 115, 117, 119, 121, 123, 125, 127, 129, 131, 133, 135, 137, 139, 141, 143, 145, 147, 149, 151, 153, 155, 157, 159, 161, 163, 165, 167, 169, 171, 173, 175, 177, 179, 181, 183, 185, 187, 189, 191, 193, 195, 197, 199, 201, 203, 205, 207, 209, 211, and 213 by 5 nucleotides.
[0604] 220. The nucleic acid molecule of embodiment 218, wherein the spacer has a nucleotide sequence that differs in length and/or sequence from any one of SEQ ID NOs: 1, 3, 5, 7, 9, 11, 13, 15, 17, 19, 21, 23, 25, 27, 29, 31, 33, 35, 37, 39, 41, 43, 45, 47, 49, 51, 53, 55, 57, 59, 61, 63, 65, 67, 69, 71, 73, 75, 77, 79, 81, 83, 85, 87, 89, 91, 93, 95, 97, 99, 101, 103, 105, 107, 109, 111, 113, 115, 117, 119, 121, 123, 125, 127, 129, 131, 133, 135, 137, 139, 141, 143, 145, 147, 149, 151, 153, 155, 157, 159, 161, 163, 165, 167, 169, 171, 173, 175, 177, 179, 181, 183, 185, 187, 189, 191, 193, 195, 197, 199, 201, 203, 205, 207, 209, 211, and 213 by 4 nucleotides.
[0605] 221. The nucleic acid molecule of embodiment 218, wherein the spacer has a nucleotide sequence that differs in length and/or sequence from any one of SEQ ID NOs: 1, 3, 5, 7, 9, 11, 13, 15, 17, 19, 21, 23, 25, 27, 29, 31, 33, 35, 37, 39, 41, 43, 45, 47, 49, 51, 53, 55, 57, 59, 61, 63, 65, 67, 69, 71, 73, 75, 77, 79, 81, 83, 85, 87, 89, 91, 93, 95, 97, 99, 101, 103, 105, 107, 109, 111, 113, 115, 117, 119, 121, 123, 125, 127, 129, 131, 133, 135, 137, 139, 141, 143, 145, 147, 149, 151, 153, 155, 157, 159, 161, 163, 165, 167, 169, 171, 173, 175, 177, 179, 181, 183, 185, 187, 189, 191, 193, 195, 197, 199, 201, 203, 205, 207, 209, 211, and 213 by 3 nucleotides.
[0606] 222. The nucleic acid molecule of embodiment 218, wherein the spacer has a nucleotide sequence that differs in length and/or sequence from any one of SEQ ID NOs: 1, 3, 5, 7, 9, 11, 13, 15, 17, 19, 21, 23, 25, 27, 29, 31, 33, 35, 37, 39, 41, 43, 45, 47, 49, 51, 53, 55, 57, 59, 61, 63, 65, 67, 69, 71, 73, 75, 77, 79, 81, 83, 85, 87, 89, 91, 93, 95, 97, 99, 101, 103, 105, 107, 109, 111, 113, 115, 117, 119, 121, 123, 125, 127, 129, 131, 133, 135, 137, 139, 141, 143, 145, 147, 149, 151, 153, 155, 157, 159, 161, 163, 165, 167, 169, 171, 173, 175, 177, 179, 181, 183, 185, 187, 189, 191, 193, 195, 197, 199, 201, 203, 205, 207, 209, 211, and 213 by 2 nucleotides.
[0607] 223. The nucleic acid molecule of embodiment 218, wherein the spacer has a nucleotide sequence that differs in length and/or sequence from any one of SEQ ID NOs: 1, 3, 5, 7, 9, 11, 13, 15, 17, 19, 21, 23, 25, 27, 29, 31, 33, 35, 37, 39, 41, 43, 45, 47, 49, 51, 53, 55, 57, 59, 61, 63, 65, 67, 69, 71, 73, 75, 77, 79, 81, 83, 85, 87, 89, 91, 93, 95, 97, 99, 101, 103, 105, 107, 109, 111, 113, 115, 117, 119, 121, 123, 125, 127, 129, 131, 133, 135, 137, 139, 141, 143, 145, 147, 149, 151, 153, 155, 157, 159, 161, 163, 165, 167, 169, 171, 173, 175, 177, 179, 181, 183, 185, 187, 189, 191, 193, 195, 197, 199, 201, 203, 205, 207, 209, 211, and 213 by 1 nucleotide.
[0608] 224. The nucleic acid molecule of embodiment 217, wherein the spacer has the nucleotide sequence set forth as any one of SEQ ID NOs: 1, 3, 5, 7, 9, 11, 13, 15, 17, 19, 21, 23, 25, 27, 29, 31, 33, 35, 37, 39, 41, 43, 45, 47, 49, 51, 53, 55, 57, 59, 61, 63, 65, 67, 69, 71, 73, 75, 77, 79, 81, 83, 85, 87, 89, 91, 93, 95, 97, 99, 101, 103, 105, 107, 109, 111, 113, 115, 117, 119, 121, 123, 125, 127, 129, 131, 133, 135, 137, 139, 141, 143, 145, 147, 149, 151, 153, 155, 157, 159, 161, 163, 165, 167, 169, 171, 173, 175, 177, 179, 181, 183, 185, 187, 189, 191, 193, 195, 197, 199, 201, 203, 205, 207, 209, 211, and 213.
[0609] 225. The nucleic acid molecule of any one of embodiments 217-224, wherein the crRNA repeat has the nucleotide sequence set forth as SEQ ID NO: 546 or a nucleotide sequence that differs in length and/or sequence from SEQ ID NO: 546 by 1 to 8 nucleotides.
[0610] 226. The nucleic acid molecule of embodiment 225, wherein the crRNA repeat has a nucleotide sequence that differs in length and/or sequence from SEQ ID NO: 546 by 8 nucleotides.
[0611] 227. The nucleic acid molecule of embodiment 225, wherein the crRNA repeat has a nucleotide sequence that differs in length and/or sequence from SEQ ID NO: 546 by 7 nucleotides.
[0612] 228. The nucleic acid molecule of embodiment 225, wherein the crRNA repeat has a nucleotide sequence that differs in length and/or sequence from SEQ ID NO: 546 by 6 nucleotides.
[0613] 229. The nucleic acid molecule of embodiment 225, wherein the crRNA repeat has a nucleotide sequence that differs in length and/or sequence from SEQ ID NO: 546 by 5 nucleotides.
[0614] 230. The nucleic acid molecule of embodiment 225, wherein the crRNA repeat has a nucleotide sequence that differs in length and/or sequence from SEQ ID NO: 546 by 4 nucleotides.
[0615] 231. The nucleic acid molecule of embodiment 225, wherein the crRNA repeat has a nucleotide sequence that differs in length and/or sequence from SEQ ID NO: 546 by 3 nucleotides.
[0616] 232. The nucleic acid molecule of embodiment 225, wherein the crRNA repeat has a nucleotide sequence that differs in length and/or sequence from SEQ ID NO: 546 by 2 nucleotides.
[0617] 233. The nucleic acid molecule of embodiment 225, wherein the crRNA repeat has a nucleotide sequence that differs in length and/or sequence from SEQ ID NO: 546 by 1 nucleotide.
[0618] 234. The nucleic acid molecule of embodiment 225, wherein the crRNA repeat has the nucleotide sequence set forth as any one of SEQ ID NOs: 546, 549-552, 839, 842, and 845.
[0619] 235. The nucleic acid molecule of any one of embodiments 217-225, wherein the crRNA has a nucleotide sequence having at least 80% sequence identity to any one of SEQ ID NOs: 574-692.
[0620] 236. The nucleic acid molecule of embodiment 235, wherein the crRNA has a nucleotide sequence having at least 90% sequence identity to any one of SEQ ID NOs: 574-692.
[0621] 237. The nucleic acid molecule of embodiment 236, wherein the crRNA has a nucleotide sequence having at least 95% sequence identity to any one of SEQ ID NOs: 574-692.
[0622] 238. The nucleic acid molecule of any one of embodiments 217-225, wherein the crRNA has the nucleotide sequence set forth as any one of SEQ ID NOs: 574-692.
[0623] 239. The nucleic acid molecule of any one of embodiments 217-238, wherein the crRNA is capable of binding a trans-activating CRISPR RNA (tracrRNA) to form a guide RNA (gRNA), wherein the tracrRNA comprises an anti-repeat and a tail.
[0624] 240. The nucleic acid molecule of embodiment 239, wherein the tracrRNA has a nucleotide sequence having at least 80% sequence identity to SEQ ID NO: 547.
[0625] 241. The nucleic acid molecule of embodiment 240, wherein the tracrRNA has a nucleotide sequence having at least 90% sequence identity to SEQ ID NO: 547.
[0626] 242. The nucleic acid molecule of embodiment 240, wherein the tracrRNA has a nucleotide sequence having at least 95% sequence identity to SEQ ID NO: 547.
[0627] 243. The nucleic acid molecule of embodiment 239, wherein the tracrRNA has a nucleotide sequence that differs in length from SEQ ID NO: 547 by 1 to 16 nucleotides.
[0628] 244. The nucleic acid molecule of embodiment 243, wherein the tracrRNA has a nucleotide sequence that is 8 nucleotides shorter than SEQ ID NO: 547.
[0629] 245. The nucleic acid molecule of embodiment 243, wherein the tracrRNA has a nucleotide sequence that is 11 nucleotides shorter than SEQ ID NO: 547.
[0630] 246. The nucleic acid molecule of any one of embodiments 240-245, wherein the tracrRNA has the nucleotide sequence set forth as any one of SEQ ID NOs: 547, 553-562, 840, 842, and 846.
[0631] 247. The nucleic acid molecule of embodiment 239, wherein the gRNA is a single guide RNA (sgRNA) comprising the crRNA and the tracrRNA linked by a linker, wherein the sgRNA comprises a backbone and the spacer, and wherein the backbone of the sgRNA comprises the crRNA repeat, the linker, and the tracrRNA.
[0632] 248. The nucleic acid molecule of embodiment 247, wherein the backbone of the sgRNA comprises a total length of 86 to 98 nucleotides.
[0633] 249. The nucleic acid molecule of embodiment 247, wherein the backbone of the sgRNA comprises a total length of 94 nucleotides.
[0634] 250. The nucleic acid molecule of embodiment 247, wherein the backbone of the sgRNA has a nucleotide sequence having at least 80% sequence identity to any one of SEQ ID NOs: 563-573.
[0635] 251. The nucleic acid molecule of embodiment 250, wherein the backbone of the sgRNA has a nucleotide sequence having at least 90% sequence identity to any one of SEQ ID NOs: 563-573.
[0636] 252. The nucleic acid molecule of embodiment 250, wherein the backbone of the sgRNA has a nucleotide sequence having at least 95% sequence identity to any one of SEQ ID NOs: 563-573.
[0637] 253. The nucleic acid molecule of embodiment 250, wherein the backbone of the sgRNA has the nucleotide sequence set forth as any one of SEQ ID NOs: 563-573.
[0638] 254. The nucleic acid molecule of any one of embodiments 239-253, wherein the gRNA comprises a first stem loop comprising a first stem and a second stem formed by hybridization of the crRNA repeat and the anti-repeat, wherein the first stem of the first stem loop comprises a total length of at least 3, 4, 5, 6, 7, 8, 9, 10, or 11 bp.
[0639] 255. The nucleic acid molecule of any one of embodiments 239-253, wherein the gRNA comprises a first stem loop comprising a first stem and a second stem formed by hybridization of the crRNA repeat and the anti-repeat, wherein the first stem of the first stem loop comprises a total length of at most 3, 4, 5, 6, 7, 8, 9, 10, or 11 bp.
[0640] 256. The nucleic acid molecule of embodiment 254 or 255, wherein the first stem of the first stem loop comprises a total length of 6 bp.
[0641] 257. The nucleic acid molecule of embodiment 254 or 255, wherein the first stem of the first stem loop comprises a total length of 3 bp.
[0642] 258. The nucleic acid molecule of any one of embodiments 239-257, wherein the tail of the tracrRNA comprises a total length of at least 1, 2, 3, 4, 5, 6, or 7 nucleotides.
[0643] 259. The nucleic acid molecule of any one of embodiments 239-257, wherein the tail of the tracrRNA comprises a total length of at most 1, 2, 3, 4, 5, 6, or 7 nucleotides.
[0644] 260. The nucleic acid molecule of embodiment 258 or 259, wherein the tail of the tracrRNA comprises a total length of 3 nucleotides.
[0645] 261. The nucleic acid molecule of embodiment 258 or 259, wherein the tail of the tracrRNA comprises a total length of 1 nucleotide.
[0646] 262. The nucleic acid molecule of any one of embodiments 254-261, wherein the gRNA further comprises a second stem loop most proximal to the tail, wherein the second stem loop comprises a first stem and a second stem.
[0647] 263. The nucleic acid molecule of embodiment 262, wherein the first stem of the second stem loop comprises a total length of at least 1, 2, 3, 4, 5, or 6 bp.
[0648] 264. The nucleic acid molecule of embodiment 262, wherein the first stem of the second stem loop comprises a total length of at most 1, 2, 3, 4, 5, or 6 bp.
[0649] 265. The nucleic acid molecule of embodiment 263 or 264, wherein the first stem of the second stem loop comprises a total length of 5 bp.
[0650] 266. The nucleic acid molecule of any one of embodiments 262-265, wherein the first stem of the first stem loop comprises a total length of 6 bp, the tail of the tracrRNA comprises a total length of 3 nucleotides, and the first stem of the second stem loop comprises a total length of 5 bp.
[0651] 267. The nucleic acid molecule of embodiment 239, wherein the gRNA is a dual guide RNA (dgRNA).
[0652] 268. The nucleic acid molecule of embodiment 267, wherein the crRNA repeat comprises a total length of at least 10, 11, 12, 13, 14, 15, 16, 17, 18, 19, 20, or 21 nucleotides.
[0653] 269. The nucleic acid molecule of embodiment 267, wherein the crRNA repeat comprises a total length of at most 10, 11, 12, 13, 14, 15, 16, 17, 18, 19, 20, or 21 nucleotides.
[0654] 270. The nucleic acid molecule of embodiment 268 or 269, wherein the crRNA repeat comprises a total length of 13 nucleotides.
[0655] 271. The nucleic acid molecule of embodiment 268 or 269, wherein the crRNA repeat comprises a total length of 16 nucleotides.
[0656] 272. The nucleic acid molecule of embodiment 268 or 269, wherein the crRNA repeat of the dgRNA comprises a total length of 21 nucleotides.
[0657] 273. The nucleic acid molecule of any one of embodiments 267-272, wherein the tracrRNA comprises a total length of at least 65, 70, 75, 80, or 85 nucleotides.
[0658] 274. The nucleic acid molecule of any one of embodiments 267-272, wherein the tracrRNA comprises a total length of at most 65, 70, 75, 80, or 85 nucleotides.
[0659] 275. The nucleic acid molecule of embodiment 273 or 274, wherein the tracrRNA comprises a total length of 74 nucleotides.
[0660] 276. The nucleic acid molecule of embodiment 273 or 274, wherein the tracrRNA comprises a total length of 77 nucleotides.
[0661] 277. The nucleic acid molecule of any one of embodiments 239-276, wherein the gRNA comprises a total length of at least 85, 90, 95, 100, 105, 110, 115, 120, 125, 130, or 135 nucleotides.
[0662] 278. The nucleic acid molecule of any one of embodiments 239-276, wherein the gRNA comprises a total length of at most 85, 90, 95, 100, 105, 110, 115, 120, 125, 130, or 135 nucleotides.
[0663] 279. The nucleic acid molecule of any one of embodiments 239-276, wherein the gRNA comprises a total length of 106 to 135 nucleotides.
[0664] 280. The nucleic acid molecule of embodiment 279, wherein the gRNA comprises a total length of 117 to 119 nucleotides.
[0665] 281. The nucleic acid molecule of any one of embodiments 239-280, wherein the gRNA is capable of targeting a bound RNA-guided nuclease (RGN) polypeptide to a target sequence.
[0666] 282. The nucleic acid molecule of embodiment 281, wherein the RGN polypeptide is capable of recognizing a consensus protospacer adjacent motif (PAM) having the nucleotide sequence set forth as NNNNCC.
[0667] 283. The nucleic acid molecule of embodiment 282, wherein the RGN polypeptide is capable of recognizing a full protospacer adjacent motif (PAM) having the nucleotide sequence set forth as any one of CAACCCCA, AACCCCAG, TTGTCCAA, CAGGCCTG, GGGTCCTT, CAAGCCCT, ATGCCCAA, CCAACCCC, CATGCCAC, GCCACCAT, GGACCCGA, CCTTCCTT, TTGGCCCT, GGGGCCGA, CTCGCCCA, GCACCCAA, CCCTCCAG, CAGCCCTC, GGCCCCCA, GGGCCCCC, GGCCCCGG, AGGGCCGA, TCCCCCTG, TTCCCCCT, GTTCCCCC, GGTTCCCC, GGGGCCCA, CGGCCCTG, GGGCCCAT, TCGGCCCT, CATGCCTC, GCCTCCTC, TCTTCCTT, TGGCCC, CAGACC, TCGGCC, CTTGCC, GGCCCC, GCAGCC, AAGCCC, GCCTCC, GCCACC, ATCCCC, AAAGCC, CCATCC, CCTTCC, TGGGCC, GGGCCC, CGGGCC, AACCCC, TCGCCC, CATGCC, AGGGCC, TGAACC, CCCGCC, TCTTCC, and GGCTCC.
[0668] 284. The nucleic acid molecule of any one of embodiments 281-283, wherein the RGN polypeptide comprises an amino acid sequence having at least 80% sequence identity to SEQ ID NO: 545; and wherein the target sequence and the spacer are selected from the group consisting of:
[0669] a) a target sequence having the nucleotide sequence set forth as SEQ ID NO: 156 and a spacer having the nucleotide sequence set forth as SEQ ID NO: 155 or a nucleotide sequence that differs in length and/or sequence from SEQ ID NO: 155 by 1 to 5 nucleotides;
[0670] b) a target sequence having the nucleotide sequence set forth as SEQ ID NO: 164 and a spacer having the nucleotide sequence set forth as SEQ ID NO: 163 or a nucleotide sequence that differs in length and/or sequence from SEQ ID NO: 163 by 1 to 5 nucleotides;
[0671] c) a target sequence having the nucleotide sequence set forth as SEQ ID NO: 190 and a spacer having the nucleotide sequence set forth as SEQ ID NO: 189 or a nucleotide sequence that differs in length and/or sequence from SEQ ID NO: 189 by 1 to 5 nucleotides;
[0672] d) a target sequence having the nucleotide sequence set forth as SEQ ID NO: 180 and a spacer having the nucleotide sequence set forth as SEQ ID NO: 179 or a nucleotide sequence that differs in length and/or sequence from SEQ ID NO: 179 by 1 to 5 nucleotides;
[0673] e) a target sequence having the nucleotide sequence set forth as SEQ ID NO: 198 and a spacer having the nucleotide sequence set forth as SEQ ID NO: 197 or a nucleotide sequence that differs in length and/or sequence from SEQ ID NO: 197 by 1 to 5 nucleotides; and
[0674] f) a target sequence having the nucleotide sequence set forth as SEQ ID NO: 194 and a spacer having the nucleotide sequence set forth as SEQ ID NO: 193 or a nucleotide sequence that differs in length and/or sequence from SEQ ID NO: 193 by 1 to 5 nucleotides.
[0675] 285. The nucleic acid molecule of embodiment 284, wherein the target sequence and the spacer are selected from the group consisting of:
[0676] a) a target sequence having the nucleotide sequence set forth as SEQ ID NO: 156 and a spacer having a nucleotide sequence that differs in length and/or sequence from SEQ ID NO: 155 by 5 nucleotides;
[0677] b) a target sequence having the nucleotide sequence set forth as SEQ ID NO: 164 and a spacer having a nucleotide sequence that differs in length and/or sequence from SEQ ID NO: 163 by 5 nucleotides;
[0678] c) a target sequence having the nucleotide sequence set forth as SEQ ID NO: 190 and a spacer having a nucleotide sequence that differs in length and/or sequence from SEQ ID NO: 189 by 5 nucleotides;
[0679] d) a target sequence having the nucleotide sequence set forth as SEQ ID NO: 180 and a spacer having a nucleotide sequence that differs in length and/or sequence from SEQ ID NO: 179 by 5 nucleotides;
[0680] e) a target sequence having the nucleotide sequence set forth as SEQ ID NO: 198 and a spacer having a nucleotide sequence that differs in length and/or sequence from SEQ ID NO: 197 by 5 nucleotides; and
[0681] f) a target sequence having the nucleotide sequence set forth as SEQ ID NO: 194 and a spacer having a nucleotide sequence that differs in length and/or sequence from SEQ ID NO: 193 by 5 nucleotides.
[0682] 286. The nucleic acid molecule of embodiment 284, wherein the target sequence and the spacer are selected from the group consisting of:
[0683] a) a target sequence having the nucleotide sequence set forth as SEQ ID NO: 156 and a spacer having a nucleotide sequence that differs in length and/or sequence from SEQ ID NO: 155 by 4 nucleotides;
[0684] b) a target sequence having the nucleotide sequence set forth as SEQ ID NO: 164 and a spacer having a nucleotide sequence that differs in length and/or sequence from SEQ ID NO: 163 by 4 nucleotides;
[0685] c) a target sequence having the nucleotide sequence set forth as SEQ ID NO: 190 and a spacer having a nucleotide sequence that differs in length and/or sequence from SEQ ID NO: 189 by 4 nucleotides;
[0686] d) a target sequence having the nucleotide sequence set forth as SEQ ID NO: 180 and a spacer having a nucleotide sequence that differs in length and/or sequence from SEQ ID NO: 179 by 4 nucleotides;
[0687] e) a target sequence having the nucleotide sequence set forth as SEQ ID NO: 198 and a spacer having a nucleotide sequence that differs in length and/or sequence from SEQ ID NO: 197 by 4 nucleotides; and
[0688] f) a target sequence having the nucleotide sequence set forth as SEQ ID NO: 194 and a spacer having a nucleotide sequence that differs in length and/or sequence from SEQ ID NO: 193 by 4 nucleotides.
[0689] 287. The nucleic acid molecule of embodiment 284, wherein the target sequence and the spacer are selected from the group consisting of:
[0690] a) a target sequence having the nucleotide sequence set forth as SEQ ID NO: 156 and a spacer having a nucleotide sequence that differs in length and/or sequence from SEQ ID NO: 155 by 3 nucleotides;
[0691] b) a target sequence having the nucleotide sequence set forth as SEQ ID NO: 164 and a spacer having a nucleotide sequence that differs in length and/or sequence from SEQ ID NO: 163 by 3 nucleotides;
[0692] c) a target sequence having the nucleotide sequence set forth as SEQ ID NO: 190 and a spacer having a nucleotide sequence that differs in length and/or sequence from SEQ ID NO: 189 by 3 nucleotides;
[0693] d) a target sequence having the nucleotide sequence set forth as SEQ ID NO: 180 and a spacer having a nucleotide sequence that differs in length and/or sequence from SEQ ID NO: 179 by 3 nucleotides;
[0694] e) a target sequence having the nucleotide sequence set forth as SEQ ID NO: 198 and a spacer having a nucleotide sequence that differs in length and/or sequence from SEQ ID NO: 197 by 3 nucleotides; and
[0695] f) a target sequence having the nucleotide sequence set forth as SEQ ID NO: 194 and a spacer having a nucleotide sequence that differs in length and/or sequence from SEQ ID NO: 193 by 3 nucleotides.
[0696] 288. The nucleic acid molecule of embodiment 284, wherein the target sequence and the spacer are selected from the group consisting of:
[0697] a) a target sequence having the nucleotide sequence set forth as SEQ ID NO: 156 and a spacer having a nucleotide sequence that differs in length and/or sequence from SEQ ID NO: 155 by 2 nucleotides;
[0698] b) a target sequence having the nucleotide sequence set forth as SEQ ID NO: 164 and a spacer having a nucleotide sequence that differs in length and/or sequence from SEQ ID NO: 163 by 2 nucleotides;
[0699] c) a target sequence having the nucleotide sequence set forth as SEQ ID NO: 190 and a spacer having a nucleotide sequence that differs in length and/or sequence from SEQ ID NO: 189 by 2 nucleotides;
[0700] d) a target sequence having the nucleotide sequence set forth as SEQ ID NO: 180 and a spacer having a nucleotide sequence that differs in length and/or sequence from SEQ ID NO: 179 by 2 nucleotides;
[0701] e) a target sequence having the nucleotide sequence set forth as SEQ ID NO: 198 and a spacer having a nucleotide sequence that differs in length and/or sequence from SEQ ID NO: 197 by 2 nucleotides; and
[0702] f) a target sequence having the nucleotide sequence set forth as SEQ ID NO: 194 and a spacer having a nucleotide sequence that differs in length and/or sequence from SEQ ID NO: 193 by 2 nucleotides.
[0703] 289. The nucleic acid molecule of embodiment 284, wherein the target sequence and the spacer are selected from the group consisting of:
[0704] a) a target sequence having the nucleotide sequence set forth as SEQ ID NO: 156 and a spacer having a nucleotide sequence that differs in length and/or sequence from SEQ ID NO: 155 by 1 nucleotide;
[0705] b) a target sequence having the nucleotide sequence set forth as SEQ ID NO: 164 and a spacer having a nucleotide sequence that differs in length and/or sequence from SEQ ID NO: 163 by 1 nucleotide;
[0706] c) a target sequence having the nucleotide sequence set forth as SEQ ID NO: 190 and a spacer having a nucleotide sequence that differs in length and/or sequence from SEQ ID NO: 189 by 1 nucleotide;
[0707] d) a target sequence having the nucleotide sequence set forth as SEQ ID NO: 180 and a spacer having a nucleotide sequence that differs in length and/or sequence from SEQ ID NO: 179 by 1 nucleotide;
[0708] e) a target sequence having the nucleotide sequence set forth as SEQ ID NO: 198 and a spacer having a nucleotide sequence that differs in length and/or sequence from SEQ ID NO: 197 by 1 nucleotide; and
[0709] f) a target sequence having the nucleotide sequence set forth as SEQ ID NO: 194 and a spacer having a nucleotide sequence that differs in length and/or sequence from SEQ ID NO: 193 by 1 nucleotide.
[0710] 290. The nucleic acid molecule of embodiment 284, wherein the spacer has the nucleotide sequence set forth as any one of SEQ ID NOs: 155, 163, 189, 179, 197, and 193.
[0711] 291. The nucleic acid molecule of any one of embodiments 284-290, wherein the RGN polypeptide has an amino acid sequence having at least 90% sequence identity to SEQ ID NO: 545.
[0712] 292. The nucleic acid molecule of any one of embodiments 2844-290, wherein the RGN polypeptide has an amino acid sequence having at least 95% sequence identity to SEQ ID NO: 545.
[0713] 293. The nucleic acid molecule of any one of embodiments 284-290, wherein the RGN polypeptide comprises an amino acid sequence set forth as SEQ ID NO: 545.
[0714] 294. The nucleic acid molecule of any one of embodiments 281-293, wherein the gRNA has a nucleotide sequence having at least 80% sequence identity to any one of SEQ ID NOs: 693-834.
[0715] 295. The nucleic acid molecule of embodiment 294, wherein the gRNA has a nucleotide sequence having at least 90% sequence identity to any one of SEQ ID NOs: 693-834.
[0716] 296. The nucleic acid molecule of embodiment 294, wherein the gRNA has a nucleotide sequence having at least 95% sequence identity to any one of SEQ ID NOs: 693-834.
[0717] 297. The nucleic acid molecule of embodiment 294, wherein the gRNA has a nucleotide sequence set forth as any one of SEQ ID NOs: 693-834.
[0718] 298. The nucleic acid molecule of embodiment 297, wherein the gRNA has a nucleotide sequence set forth as any one of SEQ ID NOs: 693, 694, 695, 696, 697, and 698.
[0719] 299. The nucleic acid molecule of embodiment 283, wherein the RGN polypeptide is capable of recognizing a full PAM having the nucleotide sequence set forth as any one of GGGTCCTT, GGGGCCGA, GGGGCCCA, CGGCCCTG, GGGCCCAT, TGGCCC, TGGGCC, GGGCCC, CGGGCC, and AGGGCC.
[0720] 300. The nucleic acid molecule of embodiment 299, wherein the RGN polypeptide has an amino acid sequence having at least 80% sequence identity to SEQ ID NO: 835.
[0721] 301. The nucleic acid molecule of embodiment 300, wherein the RGN polypeptide has an amino acid sequence having at least 90% sequence identity to SEQ ID NO: 835.
[0722] 302. The nucleic acid molecule of embodiment 300, wherein the RGN polypeptide has an amino acid sequence having at least 95% sequence identity to SEQ ID NO: 835.
[0723] 303. The nucleic acid molecule of embodiment 300, wherein the RGN polypeptide has the amino acid sequence set forth as SEQ ID NO: 835.
[0724] 304. The nucleic acid molecule of embodiment 283, wherein the RGN polypeptide is capable of recognizing a full PAM having the nucleotide sequence set forth as any one of TCGGCCCT, CAGGCCTG, TCGGCC, and CGGGCC.
[0725] 305. The nucleic acid molecule of embodiment 304, wherein the RGN polypeptide has an amino acid sequence having at least 80% sequence identity to SEQ ID NO: 915.
[0726] 306. The nucleic acid molecule of embodiment 305, wherein the RGN polypeptide has an amino acid sequence having at least 90% sequence identity to SEQ ID NO: 915.
[0727] 307. The nucleic acid molecule of embodiment 305, wherein the RGN polypeptide has an amino acid sequence having at least 95% sequence identity to SEQ ID NO: 915.
[0728] 308. The nucleic acid molecule of embodiment 305, wherein the RGN polypeptide has the amino acid sequence set forth as SEQ ID NO: 915.
[0729] 309. The nucleic acid molecule of any one of embodiments 217-308, wherein the gRNA comprises at least one chemical modification.
[0730] 310. The nucleic acid molecule of embodiment 309, wherein the at least one chemical modification comprises a bridged nucleic acid (BNA) modification; 2′-O-methyl (2′-O-Me) modification; 2′-O-methoxy-ethyl (2′MOE) modification; 2′-fluoro (2′-F) modification; 2′F-4′Cα-OMe modification; 2′,4′-di-Cα-OMe modification; 2′-O-methyl 3′phosphorothioate (MS) modification; 2′-O-methyl 3′thiophosphonoacetate (MSP) modification; 2′-O-methyl 3′phosphonoacetate (MP) modification; phosphorothioate (PS) modification; or a combination thereof.
[0731] 311. The nucleic acid molecule of embodiment 310, wherein the at least one chemical modification comprises MS modifications at the 3 terminal nucleotides at the 5′ region and at the 3 terminal nucleotides at the 3′ region of the gRNA.
[0732] 312. The nucleic acid molecule of embodiment 311, wherein the crRNA repeat has the nucleotide sequence set forth as any one of SEQ ID NOs: 940, 942-945, 1228, 1230, and 1232.
[0733] 313. The nucleic acid molecule of embodiment 311 or 312, wherein the crRNA has the nucleotide sequence set forth as any one of SEQ ID NOs: 967-1085.
[0734] 314. The nucleic acid molecule of any one of embodiments 311-313, wherein the tracrRNA has the nucleotide sequence set forth as any one of SEQ ID NOs: 941, 946-955, 1229, 1231, and 1233.
[0735] 315. The nucleic acid molecule of any one of embodiments 311-314, wherein the gRNA has the nucleotide sequence set forth as any one of SEQ ID NOs: 1086-1227.
[0736] 316. The nucleic acid molecule of embodiment 310, wherein the BNA comprises a 2′,4′ BNA modification.
[0737] 317. The nucleic acid molecule of embodiment 316, wherein the 2′,4′ BNA modification is selected from the group consisting of: locked nucleic acid (LNA) modification, BNANC[N-Me]modification, 2′-0,4′-C-ethylene bridged nucleic acid (2′,4′-ENA) modification, and S-constrained ethyl (cEt) modification.
[0738] 318. The nucleic acid molecule of embodiment 317, wherein the 2′,4′ BNA is a LNA modification.
[0739] 319. The nucleic acid molecule of embodiment 317, wherein the 2′,4′ BNA is a cEt modification.
[0740] 320. The nucleic acid molecule of embodiment 310, wherein the at least one chemical modification comprises a BNA modification, 2′-O-Me modification, PS modification, or a combination thereof.
[0741] 321. The nucleic acid molecule of any one of embodiments 239-320, wherein the gRNA further comprises an extension comprising an edit template for reverse transcriptase editing.
[0742] 322. A vector comprising the nucleic acid molecule of any one of embodiments 217-238, wherein the nucleic acid molecule comprises a polynucleotide encoding the crRNA.
[0743] 323. The vector of embodiment 322, wherein the nucleic acid molecule further comprises a heterologous promoter operably linked to the polynucleotide encoding the crRNA.
[0744] 324. The vector of embodiment 323, wherein the heterologous promoter is an RNA polymerase III (pol III) promoter.
[0745] 325. The vector of any one of embodiments 322-324, wherein the vector further comprises a nucleic acid molecule encoding an RGN polypeptide.
[0746] 326. The vector of embodiment 325, wherein the crRNA is capable of binding a tracrRNA to form a guide RNA, and wherein the guide RNA is capable of binding to the RGN polypeptide.
[0747] 327. The vector of embodiment 325 or 326, wherein the vector further comprises a promoter operably linked to the nucleic acid molecule encoding the RGN polypeptide.
[0748] 328. A vector comprising the nucleic acid molecule of any one of embodiments 239-321, wherein the nucleic acid molecule comprises a polynucleotide encoding the crRNA, and wherein the vector further comprises a polynucleotide encoding the tracrRNA.
[0749] 329. The vector of embodiment 328, wherein the polynucleotide encoding the crRNA and the polynucleotide encoding the tracrRNA are operably linked to the same promoter and are encoded as a sgRNA.
[0750] 330. The vector of embodiment 328, wherein the polynucleotide encoding the crRNA and the polynucleotide encoding the tracrRNA are operably linked to separate promoters.
[0751] 331. The vector of any one of embodiments 328-330, wherein the vector further comprises a nucleic acid molecule encoding an RGN polypeptide.
[0752] 332. The vector of embodiment 331, wherein the crRNA is capable of binding the tracrRNA to form a guide RNA, and wherein the guide RNA is capable of binding to the RGN polypeptide.
[0753] 333. The vector of embodiment 331 or 332, wherein the vector further comprises a promoter operably linked to the nucleic acid molecule encoding the RGN polypeptide.
[0754] 334. A nucleic acid molecule comprising a CRISPR RNA (crRNA) or encoding a crRNA, wherein the crRNA comprises a spacer and a crRNA repeat, wherein the spacer has the nucleotide sequence set forth as any one of SEQ ID NOs: 1, 3, 5, 7, 9, 11, 13, 15, 17, 19, 21, 23, 25, 27, 29, 31, 33, 35, 37, 39, 41, 43, 45, 47, 49, 51, 53, 55, 57, 59, 61, 63, 65, 67, 69, 71, 73, 75, 77, 79, 81, 83, 85, 87, 89, 91, 93, 95, 97, 99, 101, 103, 105, 107, 109, 111, 113, 115, 117, 119, 121, 123, 125, 127, 129, 131, 133, 135, 137, 139, 141, 143, 145, 147, 149, 151, 153, 155, 157, 159, 161, 163, 165, 167, 169, 171, 173, 175, 177, 179, 181, 183, 185, 187, 189, 191, 193, 195, 197, 199, 201, 203, 205, 207, 209, 211, and 213, or has a nucleotide sequence that differs in length and/or sequence from any one of SEQ ID NOs: 1, 3, 5, 7, 9, 11, 13, 15, 17, 19, 21, 23, 25, 27, 29, 31, 33, 35, 37, 39, 41, 43, 45, 47, 49, 51, 53, 55, 57, 59, 61, 63, 65, 67, 69, 71, 73, 75, 77, 79, 81, 83, 85, 87, 89, 91, 93, 95, 97, 99, 101, 103, 105, 107, 109, 111, 113, 115, 117, 119, 121, 123, 125, 127, 129, 131, 133, 135, 137, 139, 141, 143, 145, 147, 149, 151, 153, 155, 157, 159, 161, 163, 165, 167, 169, 171, 173, 175, 177, 179, 181, 183, 185, 187, 189, 191, 193, 195, 197, 199, 201, 203, 205, 207, 209, 211, and 213 by 1 to 5 nucleotides.
[0755] 335. The nucleic acid molecule of embodiment 334, wherein the spacer has a nucleotide sequence that differs in length and/or sequence from any one of SEQ ID NOs: 1, 3, 5, 7, 9, 11, 13, 15, 17, 19, 21, 23, 25, 27, 29, 31, 33, 35, 37, 39, 41, 43, 45, 47, 49, 51, 53, 55, 57, 59, 61, 63, 65, 67, 69, 71, 73, 75, 77, 79, 81, 83, 85, 87, 89, 91, 93, 95, 97, 99, 101, 103, 105, 107, 109, 111, 113, 115, 117, 119, 121, 123, 125, 127, 129, 131, 133, 135, 137, 139, 141, 143, 145, 147, 149, 151, 153, 155, 157, 159, 161, 163, 165, 167, 169, 171, 173, 175, 177, 179, 181, 183, 185, 187, 189, 191, 193, 195, 197, 199, 201, 203, 205, 207, 209, 211, and 213 by 1 to 5 nucleotides.
[0756] 336. The nucleic acid molecule of embodiment 335, wherein the spacer has a nucleotide sequence that differs in length and/or sequence from any one of SEQ ID NOs: 1, 3, 5, 7, 9, 11, 13, 15, 17, 19, 21, 23, 25, 27, 29, 31, 33, 35, 37, 39, 41, 43, 45, 47, 49, 51, 53, 55, 57, 59, 61, 63, 65, 67, 69, 71, 73, 75, 77, 79, 81, 83, 85, 87, 89, 91, 93, 95, 97, 99, 101, 103, 105, 107, 109, 111, 113, 115, 117, 119, 121, 123, 125, 127, 129, 131, 133, 135, 137, 139, 141, 143, 145, 147, 149, 151, 153, 155, 157, 159, 161, 163, 165, 167, 169, 171, 173, 175, 177, 179, 181, 183, 185, 187, 189, 191, 193, 195, 197, 199, 201, 203, 205, 207, 209, 211, and 213 by 5 nucleotides.
[0757] 337. The nucleic acid molecule of embodiment 335, wherein the spacer has a nucleotide sequence that differs in length and/or sequence from any one of SEQ ID NOs: 1, 3, 5, 7, 9, 11, 13, 15, 17, 19, 21, 23, 25, 27, 29, 31, 33, 35, 37, 39, 41, 43, 45, 47, 49, 51, 53, 55, 57, 59, 61, 63, 65, 67, 69, 71, 73, 75, 77, 79, 81, 83, 85, 87, 89, 91, 93, 95, 97, 99, 101, 103, 105, 107, 109, 111, 113, 115, 117, 119, 121, 123, 125, 127, 129, 131, 133, 135, 137, 139, 141, 143, 145, 147, 149, 151, 153, 155, 157, 159, 161, 163, 165, 167, 169, 171, 173, 175, 177, 179, 181, 183, 185, 187, 189, 191, 193, 195, 197, 199, 201, 203, 205, 207, 209, 211, and 213 by 4 nucleotides.
[0758] 338. The nucleic acid molecule of embodiment 335, wherein the spacer has a nucleotide sequence that differs in length and/or sequence from any one of SEQ ID NOs: 1, 3, 5, 7, 9, 11, 13, 15, 17, 19, 21, 23, 25, 27, 29, 31, 33, 35, 37, 39, 41, 43, 45, 47, 49, 51, 53, 55, 57, 59, 61, 63, 65, 67, 69, 71, 73, 75, 77, 79, 81, 83, 85, 87, 89, 91, 93, 95, 97, 99, 101, 103, 105, 107, 109, 111, 113, 115, 117, 119, 121, 123, 125, 127, 129, 131, 133, 135, 137, 139, 141, 143, 145, 147, 149, 151, 153, 155, 157, 159, 161, 163, 165, 167, 169, 171, 173, 175, 177, 179, 181, 183, 185, 187, 189, 191, 193, 195, 197, 199, 201, 203, 205, 207, 209, 211, and 213 by 3 nucleotides.
[0759] 339. The nucleic acid molecule of embodiment 335, wherein the spacer has a nucleotide sequence that differs in length and/or sequence from any one of SEQ ID NOs: 1, 3, 5, 7, 9, 11, 13, 15, 17, 19, 21, 23, 25, 27, 29, 31, 33, 35, 37, 39, 41, 43, 45, 47, 49, 51, 53, 55, 57, 59, 61, 63, 65, 67, 69, 71, 73, 75, 77, 79, 81, 83, 85, 87, 89, 91, 93, 95, 97, 99, 101, 103, 105, 107, 109, 111, 113, 115, 117, 119, 121, 123, 125, 127, 129, 131, 133, 135, 137, 139, 141, 143, 145, 147, 149, 151, 153, 155, 157, 159, 161, 163, 165, 167, 169, 171, 173, 175, 177, 179, 181, 183, 185, 187, 189, 191, 193, 195, 197, 199, 201, 203, 205, 207, 209, 211, and 213 by 2 nucleotides.
[0760] 340. The nucleic acid molecule of embodiment 335, wherein the spacer has a nucleotide sequence that differs in length and/or sequence from any one of SEQ ID NOs: 1, 3, 5, 7, 9, 11, 13, 15, 17, 19, 21, 23, 25, 27, 29, 31, 33, 35, 37, 39, 41, 43, 45, 47, 49, 51, 53, 55, 57, 59, 61, 63, 65, 67, 69, 71, 73, 75, 77, 79, 81, 83, 85, 87, 89, 91, 93, 95, 97, 99, 101, 103, 105, 107, 109, 111, 113, 115, 117, 119, 121, 123, 125, 127, 129, 131, 133, 135, 137, 139, 141, 143, 145, 147, 149, 151, 153, 155, 157, 159, 161, 163, 165, 167, 169, 171, 173, 175, 177, 179, 181, 183, 185, 187, 189, 191, 193, 195, 197, 199, 201, 203, 205, 207, 209, 211, and 213 by 1 nucleotide.
[0761] 341. The nucleic acid molecule of embodiment 334, wherein the spacer has the nucleotide sequence set forth as any one of SEQ ID NOs: 1, 3, 5, 7, 9, 11, 13, 15, 17, 19, 21, 23, 25, 27, 29, 31, 33, 35, 37, 39, 41, 43, 45, 47, 49, 51, 53, 55, 57, 59, 61, 63, 65, 67, 69, 71, 73, 75, 77, 79, 81, 83, 85, 87, 89, 91, 93, 95, 97, 99, 101, 103, 105, 107, 109, 111, 113, 115, 117, 119, 121, 123, 125, 127, 129, 131, 133, 135, 137, 139, 141, 143, 145, 147, 149, 151, 153, 155, 157, 159, 161, 163, 165, 167, 169, 171, 173, 175, 177, 179, 181, 183, 185, 187, 189, 191, 193, 195, 197, 199, 201, 203, 205, 207, 209, 211, and 213.
[0762] 342. The nucleic acid molecule of any one of embodiments 334-341, wherein the spacer is capable of hybridizing to a target sequence, and wherein the target sequence has the nucleotide sequence set forth as any one of SEQ ID NOs: 2, 4, 6, 8, 10, 12, 14, 16, 18, 20, 22, 24, 26, 28, 30, 32, 34, 36, 38, 40, 42, 44, 46, 48, 50, 52, 54, 56, 58, 60, 62, 64, 66, 68, 70, 72, 74, 76, 78, 80, 82, 84, 86, 88, 90, 92, 94, 96, 98, 100, 102, 104, 106, 108, 110, 112, 114, 116, 118, 120, 122, 124, 126, 128, 130, 132, 134, 136, 138, 140, 142, 144, 146, 148, 150, 152, 154, 156, 158, 160, 162, 164, 166, 168, 170, 172, 174, 176, 178, 180, 182, 184, 186, 188, 190, 192, 194, 196, 198, 200, 202, 204, 206, 208, 210, 212, and 214.
[0763] 343. The nucleic acid molecule of any one of embodiments 334-342, wherein the crRNA repeat has the nucleotide sequence set forth as SEQ ID NO: 546 or a nucleotide sequence that differs in length and/or sequence from SEQ ID NO: 546 by 1 to 8 nucleotides.
[0764] 344. The nucleic acid molecule of embodiment 343, wherein the crRNA repeat has a nucleotide sequence that differs in length and/or sequence from SEQ ID NO: 546 by 8 nucleotides.
[0765] 345. The nucleic acid molecule of embodiment 343, wherein the crRNA repeat has a nucleotide sequence that differs in length and/or sequence from SEQ ID NO: 546 by 7 nucleotides.
[0766] 346. The nucleic acid molecule of embodiment 343, wherein the crRNA repeat has a nucleotide sequence that differs in length and/or sequence from SEQ ID NO: 546 by 6 nucleotides.
[0767] 347. The nucleic acid molecule of embodiment 343, wherein the crRNA repeat has a nucleotide sequence that differs in length and/or sequence from SEQ ID NO: 546 by 5 nucleotides.
[0768] 348. The nucleic acid molecule of embodiment 343, wherein the crRNA repeat has a nucleotide sequence that differs in length and/or sequence from SEQ ID NO: 546 by 4 nucleotides.
[0769] 349. The nucleic acid molecule of embodiment 343, wherein the crRNA repeat has a nucleotide sequence that differs in length and/or sequence from SEQ ID NO: 546 by 3 nucleotides.
[0770] 350. The nucleic acid molecule of embodiment 343, wherein the crRNA repeat has a nucleotide sequence that differs in length and/or sequence from SEQ ID NO: 546 by 2 nucleotides.
[0771] 351. The nucleic acid molecule of embodiment 343, wherein the crRNA repeat has a nucleotide sequence that differs in length and/or sequence from SEQ ID NO: 546 by 1 nucleotide.
[0772] 352. The nucleic acid molecule of embodiment 343, wherein the crRNA repeat has the nucleotide sequence set forth as any one of SEQ ID NOs: 546, 549-552, 839, 842, and 845.
[0773] 353. The nucleic acid molecule of any one of embodiments 334-343, wherein the crRNA has a nucleotide sequence having at least 80% sequence identity to any one of SEQ ID NOs: 574-692.
[0774] 354. The nucleic acid molecule of embodiment 353, wherein the crRNA has a nucleotide sequence having at least 90% sequence identity to any one of SEQ ID NOs: 574-692.
[0775] 355. The nucleic acid molecule of embodiment 354, wherein the crRNA has a nucleotide sequence having at least 95% sequence identity to any one of SEQ ID NOs: 574-692.
[0776] 356. The nucleic acid molecule of any one of embodiments 334-343, wherein the crRNA has the nucleotide sequence set forth as any one of SEQ ID NOs: 574-692.
[0777] 357. The nucleic acid molecule of any one of embodiments 334-356, wherein the crRNA is capable of binding a trans-activating CRISPR RNA (tracrRNA) to form a guide RNA (gRNA), wherein the tracrRNA comprises an anti-repeat and a tail.
[0778] 358. The nucleic acid molecule of embodiment 357, wherein the tracrRNA has a nucleotide sequence having at least 80% sequence identity to SEQ ID NO: 547.
[0779] 359. The nucleic acid molecule of embodiment 358, wherein the tracrRNA has a nucleotide sequence having at least 90% sequence identity to SEQ ID NO: 547.
[0780] 360. The nucleic acid molecule of embodiment 358, wherein the tracrRNA has a nucleotide sequence having at least 95% sequence identity to SEQ ID NO: 547.
[0781] 361. The nucleic acid molecule of embodiment 357, wherein the tracrRNA has a nucleotide sequence that differs in length from SEQ ID NO: 547 by 1 to 16 nucleotides.
[0782] 362. The nucleic acid molecule of embodiment 361, wherein the tracrRNA has a nucleotide sequence that is 8 nucleotides shorter than SEQ ID NO: 547.
[0783] 363. The nucleic acid molecule of embodiment 361, wherein the tracrRNA has a nucleotide sequence that is 11 nucleotides shorter than SEQ ID NO: 547.
[0784] 364. The nucleic acid molecule of any one of embodiments 358-363, wherein the tracrRNA has the nucleotide sequence set forth as any one of SEQ ID NOs: 547, 553-562, 840, 842, and 846.
[0785] 365. The nucleic acid molecule of embodiment 357, wherein the gRNA is a single guide RNA (sgRNA) comprising the crRNA and the tracrRNA linked by a linker, wherein the sgRNA comprises a backbone and the spacer, and wherein the backbone of the sgRNA comprises the crRNA repeat, the linker, and the tracrRNA.
[0786] 366. The nucleic acid molecule of embodiment 365, wherein the backbone of the sgRNA comprises a total length of 86 to 98 nucleotides.
[0787] 367. The nucleic acid molecule of embodiment 365, wherein the backbone of the sgRNA comprises a total length of 94 nucleotides.
[0788] 368. The nucleic acid molecule of embodiment 365, wherein the backbone of the sgRNA has a nucleotide sequence having at least 80% sequence identity to any one of SEQ ID NOs: 563-573.
[0789] 369. The nucleic acid molecule of embodiment 368, wherein the backbone of the sgRNA has a nucleotide sequence having at least 90% sequence identity to any one of SEQ ID NOs: 563-573.
[0790] 370. The nucleic acid molecule of embodiment 368, wherein the backbone of the sgRNA has a nucleotide sequence having at least 95% sequence identity to any one of SEQ ID NOs: 563-573.
[0791] 371. The nucleic acid molecule of embodiment 368, wherein the backbone of the sgRNA has the nucleotide sequence set forth as any one of SEQ ID NOs: 563-573.
[0792] 372. The nucleic acid molecule of any one of embodiments 357-371, wherein the gRNA comprises a first stem loop comprising a first stem and a second stem formed by hybridization of the crRNA repeat and the anti-repeat, wherein the first stem of the first stem loop comprises a total length of at least 3, 4, 5, 6, 7, 8, 9, 10, or 11 bp.
[0793] 373. The nucleic acid molecule of any one of embodiments 357-371, wherein the gRNA comprises a first stem loop comprising a first stem and a second stem formed by hybridization of the crRNA repeat and the anti-repeat, wherein the first stem of the first stem loop comprises a total length of at most 3, 4, 5, 6, 7, 8, 9, 10, or 11 bp.
[0794] 374. The nucleic acid molecule of embodiment 372 or 373, wherein the first stem of the first stem loop comprises a total length of 6 bp.
[0795] 375. The nucleic acid molecule of embodiment 372 or 373, wherein the first stem of the first stem loop comprises a total length of 3 bp.
[0796] 376. The nucleic acid molecule of any one of embodiments 357-375, wherein the tail of the tracrRNA comprises a total length of at least 1, 2, 3, 4, 5, 6, or 7 nucleotides.
[0797] 377. The nucleic acid molecule of any one of embodiments 357-375, wherein the tail of the tracrRNA comprises a total length of at most 1, 2, 3, 4, 5, 6, or 7 nucleotides.
[0798] 378. The nucleic acid molecule of embodiment 376 or 377, wherein the tail of the tracrRNA comprises a total length of 3 nucleotides.
[0799] 379. The nucleic acid molecule of embodiment 376 or 377, wherein the tail of the tracrRNA comprises a total length of 1 nucleotide.
[0800] 380. The nucleic acid molecule of any one of embodiments 372-379, wherein the gRNA further comprises a second stem loop most proximal to the tail, wherein the second stem loop comprises a first stem and a second stem.
[0801] 381. The nucleic acid molecule of embodiment 380, wherein the first stem of the second stem loop comprises a total length of at least 1, 2, 3, 4, 5, or 6 bp.
[0802] 382. The nucleic acid molecule of embodiment 380, wherein the first stem of the second stem loop comprises a total length of at most 1, 2, 3, 4, 5, or 6 bp.
[0803] 383. The nucleic acid molecule of embodiment 381 or 382, wherein the first stem of the second stem loop comprises a total length of 5 bp.
[0804] 384. The nucleic acid molecule of any one of embodiments 380-383, wherein the first stem of the first stem loop comprises a total length of 6 bp, the tail of the tracrRNA comprises a total length of 3 nucleotides, and the first stem of the second stem loop comprises a total length of 5 bp.
[0805] 385. The nucleic acid molecule of embodiment 357, wherein the gRNA is a dual guide RNA (dgRNA).
[0806] 386. The nucleic acid molecule of embodiment 385, wherein the crRNA repeat comprises a total length of at least 10, 11, 12, 13, 14, 15, 16, 17, 18, 19, 20, or 21 nucleotides.
[0807] 387. The nucleic acid molecule of embodiment 385, wherein the crRNA repeat comprises a total length of at most 10, 11, 12, 13, 14, 15, 16, 17, 18, 19, 20, or 21 nucleotides.
[0808] 388. The nucleic acid molecule of embodiment 386 or 387, wherein the crRNA repeat comprises a total length of 13 nucleotides.
[0809] 389. The nucleic acid molecule of embodiment 386 or 387, wherein the crRNA repeat comprises a total length of 16 nucleotides.
[0810] 390. The nucleic acid molecule of embodiment 386 or 387, wherein the crRNA repeat of the dgRNA comprises a total length of 21 nucleotides.
[0811] 391. The nucleic acid molecule of any one of embodiments 385-390, wherein the tracrRNA comprises a total length of at least 65, 70, 75, 80, or 85 nucleotides.
[0812] 392. The nucleic acid molecule of any one of embodiments 385-390, wherein the tracrRNA comprises a total length of at most 65, 70, 75, 80, or 85 nucleotides.
[0813] 393. The nucleic acid molecule of embodiment 391 or 392, wherein the tracrRNA comprises a total length of 74 nucleotides.
[0814] 394. The nucleic acid molecule of embodiment 391 or 392, wherein the tracrRNA comprises a total length of 77 nucleotides.
[0815] 395. The nucleic acid molecule of any one of embodiments 357-394, wherein the gRNA comprises a total length of at least 85, 90, 95, 100, 105, 110, 115, 120, 125, 130, or 135 nucleotides.
[0816] 396. The nucleic acid molecule of any one of embodiments 357-394, wherein the gRNA comprises a total length of at most 85, 90, 95, 100, 105, 110, 115, 120, 125, 130, or 135 nucleotides.
[0817] 397. The nucleic acid molecule of any one of embodiments 357-394, wherein the gRNA comprises a total length of 106 to 135 nucleotides.
[0818] 398. The nucleic acid molecule of embodiment 397, wherein the gRNA comprises a total length of 117 to 119 nucleotides.
[0819] 399. The nucleic acid molecule of any one of embodiments 357-398, wherein the gRNA is capable of targeting a bound RNA-guided nuclease (RGN) polypeptide to a target sequence.
[0820] 400. The nucleic acid molecule of embodiment 399, wherein the RGN polypeptide is capable of recognizing a consensus protospacer adjacent motif (PAM) having the nucleotide sequence set forth as NNNNCC.
[0821] 401. The nucleic acid molecule of embodiment 400, wherein the RGN polypeptide is capable of recognizing a full protospacer adjacent motif (PAM) having the nucleotide sequence set forth as any one of CAACCCCA, AACCCCAG, TTGTCCAA, CAGGCCTG, GGGTCCTT, CAAGCCCT, ATGCCCAA, CCAACCCC, CATGCCAC, GCCACCAT, GGACCCGA, CCTTCCTT, TTGGCCCT, GGGGCCGA, CTCGCCCA, GCACCCAA, CCCTCCAG, CAGCCCTC, GGCCCCCA, GGGCCCCC, GGCCCCGG, AGGGCCGA, TCCCCCTG, TTCCCCCT, GTTCCCCC, GGTTCCCC, GGGGCCCA, CGGCCCTG, GGGCCCAT, TCGGCCCT, CATGCCTC, GCCTCCTC, TCTTCCTT, TGGCCC, CAGACC, TCGGCC, CTTGCC, GGCCCC, GCAGCC, AAGCCC, GCCTCC, GCCACC, ATCCCC, AAAGCC, CCATCC, CCTTCC, TGGGCC, GGGCCC, CGGGCC, AACCCC, TCGCCC, CATGCC, AGGGCC, TGAACC, CCCGCC, TCTTCC, and GGCTCC.
[0822] 402. The nucleic acid molecule of any one of embodiments 399-401, wherein the RGN polypeptide comprises an amino acid sequence having at least 80% sequence identity to SEQ ID NO: 545; and wherein the target sequence and the spacer are selected from the group consisting of:
[0823] a) a target sequence having the nucleotide sequence set forth as SEQ ID NO: 156 and a spacer having the nucleotide sequence set forth as SEQ ID NO: 155 or a nucleotide sequence that differs in length and/or sequence from SEQ ID NO: 155 by 1 to 5 nucleotides;
[0824] b) a target sequence having the nucleotide sequence set forth as SEQ ID NO: 164 and a spacer having the nucleotide sequence set forth as SEQ ID NO: 163 or a nucleotide sequence that differs in length and/or sequence from SEQ ID NO: 163 by 1 to 5 nucleotides;
[0825] c) a target sequence having the nucleotide sequence set forth as SEQ ID NO: 190 and a spacer having the nucleotide sequence set forth as SEQ ID NO: 189 or a nucleotide sequence that differs in length and/or sequence from SEQ ID NO: 189 by 1 to 5 nucleotides;
[0826] d) a target sequence having the nucleotide sequence set forth as SEQ ID NO: 180 and a spacer having the nucleotide sequence set forth as SEQ ID NO: 179 or a nucleotide sequence that differs in length and/or sequence from SEQ ID NO: 179 by 1 to 5 nucleotides;
[0827] e) a target sequence having the nucleotide sequence set forth as SEQ ID NO: 198 and a spacer having the nucleotide sequence set forth as SEQ ID NO: 197 or a nucleotide sequence that differs in length and/or sequence from SEQ ID NO: 197 by 1 to 5 nucleotides; and
[0828] f) a target sequence having the nucleotide sequence set forth as SEQ ID NO: 194 and a spacer having the nucleotide sequence set forth as SEQ ID NO: 193 or a nucleotide sequence that differs in length and/or sequence from SEQ ID NO: 193 by 1 to 5 nucleotides.
[0829] 403. The nucleic acid molecule of embodiment 402, wherein the target sequence and the spacer are selected from the group consisting of:
[0830] a) a target sequence having the nucleotide sequence set forth as SEQ ID NO: 156 and a spacer having a nucleotide sequence that differs in length and/or sequence from SEQ ID NO: 155 by 5 nucleotides;
[0831] b) a target sequence having the nucleotide sequence set forth as SEQ ID NO: 164 and a spacer having a nucleotide sequence that differs in length and/or sequence from SEQ ID NO: 163 by 5 nucleotides;
[0832] c) a target sequence having the nucleotide sequence set forth as SEQ ID NO: 190 and a spacer having a nucleotide sequence that differs in length and/or sequence from SEQ ID NO: 189 by 5 nucleotides;
[0833] d) a target sequence having the nucleotide sequence set forth as SEQ ID NO: 180 and a spacer having a nucleotide sequence that differs in length and/or sequence from SEQ ID NO: 179 by 5 nucleotides;
[0834] e) a target sequence having the nucleotide sequence set forth as SEQ ID NO: 198 and a spacer having a nucleotide sequence that differs in length and/or sequence from SEQ ID NO: 197 by 5 nucleotides; and
[0835] f) a target sequence having the nucleotide sequence set forth as SEQ ID NO: 194 and a spacer having a nucleotide sequence that differs in length and/or sequence from SEQ ID NO: 193 by 5 nucleotides.
[0836] 404. The nucleic acid molecule of embodiment 402, wherein the target sequence and the spacer are selected from the group consisting of:
[0837] a) a target sequence having the nucleotide sequence set forth as SEQ ID NO: 156 and a spacer having a nucleotide sequence that differs in length and/or sequence from SEQ ID NO: 155 by 4 nucleotides;
[0838] b) a target sequence having the nucleotide sequence set forth as SEQ ID NO: 164 and a spacer having a nucleotide sequence that differs in length and/or sequence from SEQ ID NO: 163 by 4 nucleotides;
[0839] c) a target sequence having the nucleotide sequence set forth as SEQ ID NO: 190 and a spacer having a nucleotide sequence that differs in length and/or sequence from SEQ ID NO: 189 by 4 nucleotides;
[0840] d) a target sequence having the nucleotide sequence set forth as SEQ ID NO: 180 and a spacer having a nucleotide sequence that differs in length and/or sequence from SEQ ID NO: 179 by 4 nucleotides;
[0841] e) a target sequence having the nucleotide sequence set forth as SEQ ID NO: 198 and a spacer having a nucleotide sequence that differs in length and/or sequence from SEQ ID NO: 197 by 4 nucleotides; and
[0842] f) a target sequence having the nucleotide sequence set forth as SEQ ID NO: 194 and a spacer having a nucleotide sequence that differs in length and/or sequence from SEQ ID NO: 193 by 4 nucleotides.
[0843] 405. The nucleic acid molecule of embodiment 402, wherein the target sequence and the spacer are selected from the group consisting of:
[0844] a) a target sequence having the nucleotide sequence set forth as SEQ ID NO: 156 and a spacer having a nucleotide sequence that differs in length and/or sequence from SEQ ID NO: 155 by 3 nucleotides;
[0845] b) a target sequence having the nucleotide sequence set forth as SEQ ID NO: 164 and a spacer having a nucleotide sequence that differs in length and/or sequence from SEQ ID NO: 163 by 3 nucleotides;
[0846] c) a target sequence having the nucleotide sequence set forth as SEQ ID NO: 190 and a spacer having a nucleotide sequence that differs in length and/or sequence from SEQ ID NO: 189 by 3 nucleotides;
[0847] d) a target sequence having the nucleotide sequence set forth as SEQ ID NO: 180 and a spacer having a nucleotide sequence that differs in length and/or sequence from SEQ ID NO: 179 by 3 nucleotides;
[0848] e) a target sequence having the nucleotide sequence set forth as SEQ ID NO: 198 and a spacer having a nucleotide sequence that differs in length and/or sequence from SEQ ID NO: 197 by 3 nucleotides; and
[0849] f) a target sequence having the nucleotide sequence set forth as SEQ ID NO: 194 and a spacer having a nucleotide sequence that differs in length and/or sequence from SEQ ID NO: 193 by 3 nucleotides.
[0850] 406. The nucleic acid molecule of embodiment 402, wherein the target sequence and the spacer are selected from the group consisting of:
[0851] a) a target sequence having the nucleotide sequence set forth as SEQ ID NO: 156 and a spacer having a nucleotide sequence that differs in length and/or sequence from SEQ ID NO: 155 by 2 nucleotides;
[0852] b) a target sequence having the nucleotide sequence set forth as SEQ ID NO: 164 and a spacer having a nucleotide sequence that differs in length and/or sequence from SEQ ID NO: 163 by 2 nucleotides;
[0853] c) a target sequence having the nucleotide sequence set forth as SEQ ID NO: 190 and a spacer having a nucleotide sequence that differs in length and/or sequence from SEQ ID NO: 189 by 2 nucleotides;
[0854] d) a target sequence having the nucleotide sequence set forth as SEQ ID NO: 180 and a spacer having a nucleotide sequence that differs in length and/or sequence from SEQ ID NO: 179 by 2 nucleotides;
[0855] e) a target sequence having the nucleotide sequence set forth as SEQ ID NO: 198 and a spacer having a nucleotide sequence that differs in length and/or sequence from SEQ ID NO: 197 by 2 nucleotides; and
[0856] f) a target sequence having the nucleotide sequence set forth as SEQ ID NO: 194 and a spacer having a nucleotide sequence that differs in length and/or sequence from SEQ ID NO: 193 by 2 nucleotides.
[0857] 407. The nucleic acid molecule of embodiment 402, wherein the target sequence and the spacer are selected from the group consisting of:
[0858] a) a target sequence having the nucleotide sequence set forth as SEQ ID NO: 156 and a spacer having a nucleotide sequence that differs in length and/or sequence from SEQ ID NO: 155 by 1 nucleotide;
[0859] b) a target sequence having the nucleotide sequence set forth as SEQ ID NO: 164 and a spacer having a nucleotide sequence that differs in length and/or sequence from SEQ ID NO: 163 by 1 nucleotide;
[0860] c) a target sequence having the nucleotide sequence set forth as SEQ ID NO: 190 and a spacer having a nucleotide sequence that differs in length and/or sequence from SEQ ID NO: 189 by 1 nucleotide;
[0861] d) a target sequence having the nucleotide sequence set forth as SEQ ID NO: 180 and a spacer having a nucleotide sequence that differs in length and/or sequence from SEQ ID NO: 179 by 1 nucleotide;
[0862] e) a target sequence having the nucleotide sequence set forth as SEQ ID NO: 198 and a spacer having a nucleotide sequence that differs in length and/or sequence from SEQ ID NO: 197 by 1 nucleotide; and
[0863] f) a target sequence having the nucleotide sequence set forth as SEQ ID NO: 194 and a spacer having a nucleotide sequence that differs in length and/or sequence from SEQ ID NO: 193 by 1 nucleotide.
[0864] 408. The nucleic acid molecule of embodiment 402, wherein the spacer has the nucleotide sequence set forth as any one of SEQ ID NOs: 155, 163, 189, 179, 197, and 193.
[0865] 409. The nucleic acid molecule of any one of embodiments 402-408, wherein the RGN polypeptide has an amino acid sequence having at least 90% sequence identity to SEQ ID NO: 545.
[0866] 410. The nucleic acid molecule of any one of embodiments 402-408, wherein the RGN polypeptide has an amino acid sequence having at least 95% sequence identity to SEQ ID NO: 545.
[0867] 411. The nucleic acid molecule of any one of embodiments 402-408, wherein the RGN polypeptide comprises an amino acid sequence set forth as SEQ ID NO: 545.
[0868] 412. The nucleic acid molecule of any one of embodiments 399-411, wherein the gRNA has a nucleotide sequence having at least 80% sequence identity to any one of SEQ ID NOs: 693-834.
[0869] 413. The nucleic acid molecule of embodiment 412, wherein the gRNA has a nucleotide sequence having at least 90% sequence identity to any one of SEQ ID NOs: 693-834.
[0870] 414. The nucleic acid molecule of embodiment 412, wherein the gRNA has a nucleotide sequence having at least 95% sequence identity to any one of SEQ ID NOs: 693-834.
[0871] 415. The nucleic acid molecule of embodiment 412, wherein the gRNA has a nucleotide sequence set forth as any one of SEQ ID NOs: 693-834.
[0872] 416. The nucleic acid molecule of embodiment 412, wherein the gRNA has a nucleotide sequence set forth as any one of SEQ ID NOs: 693, 694, 695, 696, 697, and 698.
[0873] 417. The nucleic acid molecule of embodiment 401, wherein the RGN polypeptide is capable of recognizing a full PAM having the nucleotide sequence set forth as any one of GGGTCCTT, GGGGCCGA, GGGGCCCA, CGGCCCTG, GGGCCCAT, TGGCCC, TGGGCC, GGGCCC, CGGGCC, and AGGGCC.
[0874] 418. The nucleic acid molecule of embodiment 417, wherein the RGN polypeptide has an amino acid sequence having at least 80% sequence identity to SEQ ID NO: 835.
[0875] 419. The nucleic acid molecule of embodiment 418, wherein the RGN polypeptide has an amino acid sequence having at least 90% sequence identity to SEQ ID NO: 835.
[0876] 420. The nucleic acid molecule of embodiment 418, wherein the RGN polypeptide has an amino acid sequence having at least 95% sequence identity to SEQ ID NO: 835.
[0877] 421. The nucleic acid molecule of embodiment 418, wherein the RGN polypeptide has the amino acid sequence set forth as SEQ ID NO: 835.
[0878] 422. The nucleic acid molecule of embodiment 401, wherein the RGN polypeptide is capable of recognizing a full PAM having the nucleotide sequence set forth as any one of TCGGCCCT, CAGGCCTG, TCGGCC, and CGGGCC.
[0879] 423. The nucleic acid molecule of embodiment 422, wherein the RGN polypeptide has an amino acid sequence having at least 80% sequence identity to SEQ ID NO: 915.
[0880] 424. The nucleic acid molecule of embodiment 423, wherein the RGN polypeptide has an amino acid sequence having at least 90% sequence identity to SEQ ID NO: 915.
[0881] 425. The nucleic acid molecule of embodiment 423, wherein the RGN polypeptide has an amino acid sequence having at least 95% sequence identity to SEQ ID NO: 915.
[0882] 426. The nucleic acid molecule of embodiment 423, wherein the RGN polypeptide has the amino acid sequence set forth as SEQ ID NO: 915.
[0883] 427. The nucleic acid molecule of any one of embodiments 357-426, wherein the gRNA comprises at least one chemical modification.
[0884] 428. The nucleic acid molecule of embodiment 427, wherein the at least one chemical modification comprises a bridged nucleic acid (BNA) modification; 2′-O-methyl (2′-O-Me) modification; 2′-O-methoxy-ethyl (2′MOE) modification; 2′-fluoro (2′-F) modification; 2′F-4′Cα-OMe modification; 2′,4′-di-Cα-OMe modification; 2′-O-methyl 3′phosphorothioate (MS) modification; 2′-O-methyl 3′thiophosphonoacetate (MSP) modification; 2′-O-methyl 3′phosphonoacetate (MP) modification; phosphorothioate (PS) modification; or a combination thereof.
[0885] 429. The nucleic acid molecule of embodiment 428, wherein the at least one chemical modification comprises MS modifications at the 3 terminal nucleotides at the 5′ region and at the 3 terminal nucleotides at the 3′ region of the gRNA.
[0886] 430. The nucleic acid molecule of embodiment 429, wherein the crRNA repeat has the nucleotide sequence set forth as any one of SEQ ID NOs: 940, 942-945, 1228, 1230, and 1232.
[0887] 431. The nucleic acid molecule of embodiment 429 or 430, wherein the crRNA has the nucleotide sequence set forth as any one of SEQ ID NOs: 967-1085.
[0888] 432. The nucleic acid molecule of any one of embodiments 429-431, wherein the tracrRNA has the nucleotide sequence set forth as any one of SEQ ID NOs: 941, 946-955, 1229, 1231, and 1233.
[0889] 433. The nucleic acid molecule of any one of embodiments 429-432, wherein the gRNA has the nucleotide sequence set forth as any one of SEQ ID NOs: 1086-1227.
[0890] 434. The nucleic acid molecule of embodiment 428, wherein the BNA comprises a 2′,4′ BNA modification.
[0891] 435. The nucleic acid molecule of embodiment 434, wherein the 2′,4′ BNA modification is selected from the group consisting of: locked nucleic acid (LNA) modification, BNANC[N-Me]modification, 2′-0,4′-C-ethylene bridged nucleic acid (2′,4′-ENA) modification, and S-constrained ethyl (cEt) modification.
[0892] 436. The nucleic acid molecule of embodiment 435, wherein the 2′,4′ BNA is a LNA modification.
[0893] 437. The nucleic acid molecule of embodiment 435, wherein the 2′,4′ BNA is a cEt modification.
[0894] 438. The nucleic acid molecule of embodiment 428, wherein the at least one chemical modification comprises a BNA modification, 2′-O-Me modification, PS modification, or a combination thereof.
[0895] 439. The nucleic acid molecule of any one of embodiments 357-438, wherein the gRNA further comprises an extension comprising an edit template for reverse transcriptase editing.
[0896] 440. A vector comprising the nucleic acid molecule of any one of embodiments 334-356, wherein the nucleic acid molecule comprises a polynucleotide encoding the crRNA.
[0897] 441. The vector of embodiment 440, wherein the nucleic acid molecule further comprises a heterologous promoter operably linked to the polynucleotide encoding the crRNA.
[0898] 442. The vector of embodiment 441, wherein the heterologous promoter is an RNA polymerase III (pol III) promoter.
[0899] 443. The vector of any one of embodiments 440-442, wherein the vector further comprises a nucleic acid molecule encoding an RGN polypeptide.
[0900] 444. The vector of embodiment 443, wherein the crRNA is capable of binding a tracrRNA to form a guide RNA, and wherein the guide RNA is capable of binding to the RGN polypeptide.
[0901] 445. The vector of embodiment 443 or 444, wherein the vector further comprises a promoter operably linked to the nucleic acid molecule encoding the RGN polypeptide.
[0902] 446. A vector comprising the nucleic acid molecule of any one of embodiments 357-439, wherein the nucleic acid molecule comprises a polynucleotide encoding the crRNA, and wherein the vector further comprises a polynucleotide encoding the tracrRNA.
[0903] 447. The vector of embodiment 446, wherein the polynucleotide encoding the crRNA and the polynucleotide encoding the tracrRNA are operably linked to the same promoter and are encoded as a sgRNA.
[0904] 448. The vector of embodiment 446, wherein the polynucleotide encoding the crRNA and the polynucleotide encoding the tracrRNA are operably linked to separate promoters.
[0905] 449. The vector of any one of embodiments 446-448, wherein the vector further comprises a nucleic acid molecule encoding an RGN polypeptide.
[0906] 450. The vector of embodiment 449, wherein the crRNA is capable of binding the tracrRNA to form a guide RNA, and wherein the guide RNA is capable of binding to the RGN polypeptide.
[0907] 451. The vector of embodiment 449 or 450, wherein the vector further comprises a promoter operably linked to the nucleic acid molecule encoding the RGN polypeptide.
[0908] 452. A cell comprising the gRNA of any one of embodiments 1-216, the nucleic acid molecule of any one of embodiments 217-321 and 334-439, or the vector of any one of embodiments 322-333 and 440-451.
[0909] 453. An RNA-guided nuclease (RGN) system for binding a target sequence within a forkhead box P3 (FOXP3) gene, wherein the RGN system comprises:
[0910] a) one or more guide RNA (gRNA) of any one of embodiments 1-216, or one or more polynucleotides comprising one or more nucleotide sequences encoding the one or more gRNA of any one of embodiments 1-216; and
[0911] b) an RGN polypeptide, or a polynucleotide comprising a nucleotide sequence encoding the RGN polypeptide.
[0912] 454. The RGN system of embodiment 453, wherein the one or more gRNA is capable of forming a complex with the RGN polypeptide to direct the RGN polypeptide to bind to the target sequence.
[0913] 455. The RGN system of embodiment 453 or 454, wherein the RGN polypeptide is capable of recognizing a consensus protospacer adjacent motif (PAM) having the nucleotide sequence set forth as NNNNCC.
[0914] 456. The RGN system of embodiment 455, wherein the RGN polypeptide is capable of recognizing a full PAM having a nucleotide sequence set forth as any one of CAACCCCA, AACCCCAG, TTGTCCAA, CAGGCCTG, GGGTCCTT, CAAGCCCT, ATGCCCAA, CCAACCCC, CATGCCAC, GCCACCAT, GGACCCGA, CCTTCCTT, TTGGCCCT, GGGGCCGA, CTCGCCCA, GCACCCAA, CCCTCCAG, CAGCCCTC, GGCCCCCA, GGGCCCCC, GGCCCCGG, AGGGCCGA, TCCCCCTG, TTCCCCCT, GTTCCCCC, GGTTCCCC, GGGGCCCA, CGGCCCTG, GGGCCCAT, TCGGCCCT, CATGCCTC, GCCTCCTC, TCTTCCTT, TGGCCC, CAGACC, TCGGCC, CTTGCC, GGCCCC, GCAGCC, AAGCCC, GCCTCC, GCCACC, ATCCCC, AAAGCC, CCATCC, CCTTCC, TGGGCC, GGGCCC, CGGGCC, AACCCC, TCGCCC, CATGCC, AGGGCC, TGAACC, CCCGCC, TCTTCC, and GGCTCC.
[0915] 457. The RGN system of any one of embodiments 453-456, wherein the RGN polypeptide comprises an amino acid sequence having at least 80% sequence identity to SEQ ID NO: 545.
[0916] 458. The RGN system of embodiment 457, wherein the RGN polypeptide comprises an amino acid sequence having at least 90% sequence identity to SEQ ID NO: 545.
[0917] 459. The RGN system of embodiment 457, wherein the RGN polypeptide comprises an amino acid sequence having at least 95% sequence identity to SEQ ID NO: 545.
[0918] 460. The RGN system of embodiment 457, wherein the RGN polypeptide comprises the amino acid sequence set forth as SEQ ID NO: 545.
[0919] 461. The RGN system of any one of embodiments 453-460, wherein the polynucleotide comprising a nucleotide sequence encoding the RGN polypeptide is codon optimized for expression in a mammalian cell.
[0920] 462. The RGN system of any one of embodiments 453-461, wherein at least one of the one or more nucleotide sequences encoding the one or more gRNAs and the nucleotide sequence encoding the RGN polypeptide is operably linked to a promoter heterologous to the nucleotide sequence.
[0921] 463. The RGN system of any one of embodiments 453-462, wherein the one or more nucleotide sequences encoding the one or more gRNAs and the nucleotide sequence encoding the RGN polypeptide are located on one vector.
[0922] 464. The RGN system of any one of embodiments 453-460, wherein the polynucleotide comprising a nucleotide sequence encoding the RGN polypeptide comprises an mRNA.
[0923] 465. The RGN system of any one of embodiments 453-464, wherein the RGN polypeptide is nuclease inactive or is a nickase.
[0924] 466. The RGN system of any one of embodiments 453-465, wherein the RGN polypeptide is fused to a base-editing polypeptide.
[0925] 467. The RGN system of embodiment 466, wherein the base-editing polypeptide comprises a deaminase.
[0926] 468. The RGN system of any one of embodiments 453-465, wherein the RGN polypeptide is fused to a reverse transcriptase (RT) editing polypeptide.
[0927] 469. The RGN system of embodiment 468, wherein the RT editing polypeptide comprises a DNA polymerase.
[0928] 470. The RGN system of embodiment 469, wherein the DNA polymerase comprises a reverse transcriptase.
[0929] 471. The RGN system of any one of embodiments 468-470, wherein the gRNA further comprises an extension comprising an edit template for RT editing.
[0930] 472. The RGN system of any one of embodiments 453-471, wherein the RGN polypeptide comprises one or more nuclear localization signals.
[0931] 473. A ribonucleoprotein (RNP) complex comprising the one or more gRNA and the RGN polypeptide of the RGN system of any one of embodiments 453-472.
[0932] 474. A cell comprising the RGN system of any one of embodiments 453-472 or the RNP complex of embodiment 473.
[0933] 475. The cell of embodiment 474, wherein the cell is a eukaryotic cell.
[0934] 476. The cell of embodiment 475, wherein the eukaryotic cell is a mammalian cell.
[0935] 477. The cell of embodiment 476, wherein the mammalian cell is a human cell.
[0936] 478. The cell of embodiment 476 or 477, wherein the mammalian cell or human cell is a T cell or an induced pluripotent stem cell.
[0937] 479. A method for binding a target sequence within a FOXP3 gene, comprising delivering the RGN system of any one of embodiments 453-472 or the RNP complex of embodiment 473 to the target sequence or a cell comprising the target sequence.
[0938] 480. The method of embodiment 479, wherein cleavage or modification of the target sequence occurs.
[0939] 481. A method for assembling an RNA-guided nuclease (RGN) ribonucleoprotein complex, the method comprising combining under conditions suitable for formation of the complex:
[0940] a) the guide RNA of any one of embodiments 1-216; and
[0941] b) an RGN polypeptide that binds the guide RNA.
[0942] 482. The method of embodiment 481, wherein the RGN polypeptide is capable of recognizing a consensus protospacer adjacent motif (PAM) having the nucleotide sequence set forth as NNNNCC.
[0943] 483. The method of embodiment 481 or 482, wherein the complex directs cleavage of the target sequence.
[0944] 484. The method of embodiment 483, wherein the cleavage generates a double-stranded break.
[0945] 485. The method of embodiment 483, wherein the cleavage generates a single-stranded break.
[0946] 486. A method for binding a target sequence within a FOXP3 gene, the method comprising:
[0947] a) combining under conditions suitable for formation of a ribonucleoprotein (RNP) complex:
   [0948] i) the guide RNA of any one of embodiments 1-216; and
   [0949] ii) an RGN polypeptide that binds the guide RNA; thereby assembling an RNP complex; and
[0950] b) contacting the target sequence or a cell comprising the target sequence with the assembled RNP complex.
[0951] 487. The method of embodiment 486, wherein the guide RNA hybridizes to the target sequence, thereby directing binding of the RNP complex to the target sequence.
[0952] 488. The method of embodiment 486 or 487, wherein the RGN polypeptide is capable of recognizing a consensus protospacer adjacent motif (PAM) having the nucleotide sequence set forth as NNNNCC.
[0953] 489. The method of embodiment 488, wherein the RGN polypeptide is capable of recognizing a full protospacer adjacent motif (PAM) having the nucleotide sequence set forth as any one of CAACCCCA, AACCCCAG, TTGTCCAA, CAGGCCTG, GGGTCCTT, CAAGCCCT, ATGCCCAA, CCAACCCC, CATGCCAC, GCCACCAT, GGACCCGA, CCTTCCTT, TTGGCCCT, GGGGCCGA, CTCGCCCA, GCACCCAA, CCCTCCAG, CAGCCCTC, GGCCCCCA, GGGCCCCC, GGCCCCGG, AGGGCCGA, TCCCCCTG, TTCCCCCT, GTTCCCCC, GGTTCCCC, GGGGCCCA, CGGCCCTG, GGGCCCAT, TCGGCCCT, CATGCCTC, GCCTCCTC, TCTTCCTT, TGGCCC, CAGACC, TCGGCC, CTTGCC, GGCCCC, GCAGCC, AAGCCC, GCCTCC, GCCACC, ATCCCC, AAAGCC, CCATCC, CCTTCC, TGGGCC, GGGCCC, CGGGCC, AACCCC, TCGCCC, CATGCC, AGGGCC, TGAACC, CCCGCC, TCTTCC, and GGCTCC.
[0954] 490. The method of any one of embodiments 486-489, wherein the RGN polypeptide comprises an amino acid sequence having at least 80% sequence identity to SEQ ID NO: 545.
[0955] 491. The method of embodiment 490, wherein the RGN polypeptide comprises an amino acid sequence having at least 90% sequence identity to SEQ ID NO: 545.
[0956] 492. The method of embodiment 490, wherein the RGN polypeptide comprises an amino acid sequence having at least 95% sequence identity to SEQ ID NO: 545.
[0957] 493. The method of embodiment 490, wherein the RGN polypeptide comprises an amino acid sequence set forth as SEQ ID NO: 545.
[0958] 494. The method of any one of embodiments 486-493, wherein the method is performed in vitro or ex vivo.
[0959] 495. The method of any one of embodiments 486-494, wherein the RGN polypeptide is capable of cleaving the target sequence, thereby allowing for the cleaving and/or modifying of the target sequence.
[0960] 496. The method of embodiment 495, wherein the cleaving generates a single-stranded break.
[0961] 497. The method of embodiment 495, wherein the cleaving generates a double-stranded break.
[0962] 498. The method of embodiment 495, wherein the cleaving results in insertion of a heterologous sequence within the target sequence.
[0963] 499. The method of any one of embodiments 486-494, wherein the RGN polypeptide is nuclease inactive or is a nickase.
[0964] 500. The method of embodiment 499, wherein the RGN polypeptide is fused to a base-editing polypeptide.
[0965] 501. The method of embodiment 500, wherein the base-editing polypeptide comprises a deaminase.
[0966] 502. The method of any one of embodiments 486-494, wherein the RGN is fused to a reverse transcriptase (RT) editing polypeptide.
[0967] 503. The method of embodiment 502, wherein the RT editing polypeptide comprises a DNA polymerase.
[0968] 504. The method of embodiment 503, wherein the DNA polymerase comprises a reverse transcriptase.
[0969] 505. The method of any one of embodiments 502-504, wherein the gRNA further comprises an extension comprising an edit template for RT editing.
[0970] 506. The method of any one of embodiments 486-505, wherein the target sequence is within a cell.
[0971] 507. The method of embodiment 506, wherein the cell is a eukaryotic cell.
[0972] 508. The method of embodiment 507, wherein the eukaryotic cell is a mammalian cell.
[0973] 509. The method of embodiment 508, wherein the mammalian cell is a human cell.
[0974] 510. The method of embodiment 508 or 509, wherein the mammalian cell or human cell is a T cell or an induced pluripotent stem cell.
[0975] 511. The method of any one of embodiments 486-510, further comprising selecting a cell comprising a modified target sequence.
[0976] 512. A cell comprising a modified target sequence obtained according to the method of embodiment 511.
[0977] 513. The cell of embodiment 512, wherein the cell is a eukaryotic cell.
[0978] 514. The cell of embodiment 513, wherein the eukaryotic cell is a mammalian cell.
[0979] 515. The cell of embodiment 514, wherein the mammalian cell is a human cell.
[0980] 516. The cell of embodiment 514 or 515, wherein the mammalian cell or human cell is a T cell or an induced pluripotent stem cell.
[0981] 517. A method for producing a genetically modified cell comprising insertions and/or deletions within a forkhead box P3 (FOXP3) gene, wherein the method comprises introducing into a cell the RGN system of any one of embodiments 453-472 or an RNP complex of embodiment 473.
[0982] 518. The method of embodiment 517, wherein the genetically modified cell has lower levels of Foxp3 protein compared to a cell that has not been genetically modified.
[0983] 519. The method of embodiment 517 or 518, wherein the cell is a mammalian cell.
[0984] 520. The method of embodiment 519, wherein the mammalian cell is a human cell.
[0985] 521. The method of embodiment 519 or 520, wherein the mammalian cell or human cell is a T cell or an induced pluripotent stem cell.
[0986] 522. A genetically modified cell comprising insertions and/or deletions within a FOXP3 gene produced according to the method of any one of embodiments 517-521.
[0987] 523. A method for modulating expression of a forkhead box P3 (FOXP3) gene in a population of cells, comprising delivering the RGN system of any one of embodiments 453-472 or the RNP complex of embodiment 473 to the population of cells, wherein the population of cells comprises the target sequence, and wherein FOXP3 gene expression is modulated as compared to FOXP3 gene expression in a control population of cells.
[0988] 524. The method of embodiment 523, wherein cleavage or modification of the target sequence occurs.
[0989] 525. The method of embodiment 524, wherein cleavage or modification of the target sequence is detected by sequencing.
[0990] 526. The method of any one of embodiments 523-525, wherein FOXP3 gene expression is measured by quantitative PCR, microarray, RNA-seq, flow cytometry, immunoblot, enzyme-linked immunosorbent assay (ELISA), protein immunoprecipitation, immunostaining, high performance liquid chromatography (HPLC), liquid chromatography-mass spectrometry (LC/MS), mass spectrometry, or a combination thereof.
[0991] 527. The method of any one of embodiment 523-526, wherein FOXP3 gene expression is decreased.
[0992] 528. The method of embodiment 527, wherein the decrease in FOXP3 gene expression comprises decrease in FOXP3 mRNA and/or Foxp3 protein.
[0993] 529. The method of any one of embodiments 524-528, wherein cleavage or modification of the target sequence occurs at a rate of 40% to 100%.
[0994] 530. The method of any one of embodiments 524-529, wherein cleavage or modification of the target sequence occurs at a rate of 80% to 100%.
[0995] 531. The method of any one of embodiments 523-530, wherein the control population of cells has not been subjected to the delivering.
[0996] 532. The method of any one of embodiments 523-531, wherein the population of cells comprises T cells.
   The following examples are offered by way of illustration and not by way of limitation.

### EXAMPLES

### Example 1. A Screen to Identify Guide RNAs Effective in Targeting a Forkhead Protein P3 (FOXP3) gene for editing

[0997] Guide RNAs were screened for their effectiveness in cutting target sequences in the FOXP3 gene in association with the APG07433.1 RGN. T cells were thawed and activated as described in Example 2. Three days after activation, 4 μg of guide RNA and 2 μg of the APG07433.1 RGN were delivered to the T cells via Amaxa nucleofection. The tested guide RNAs, their target sequences, and PAM sequences are listed in Table 2. Table 2 also indicates which FOXP3 target sequences could also be targeted by S. pyogenes Cas9 (SpyCas9) and/or LPG10145 RGN due to the PAM sequences. Two days after lipofection, the genomic DNA (gDNA) was extracted from the cells, and next generation sequencing (NGS) was performed on an amplified fragment of the FOXP3 gene. Table 4 shows the primer sequences used for amplifications. An initial screen using mRNA encoding the APG07433.1 RGN (mRNA) or the APG07433.1 RGN (RNP) showed that using 20 nt spacer lengths yielded low editing (FIG. 12A). A subsequent screen was performed with increased spacer length for top guide RNAs having editing above 5%. Table 3 and FIG. 12B show gene editing as percent insertions and deletions (indels) using FOXP3 guide RNAs with APG07433.1 RGN. Table 5 shows gene editing data for lead FOXP3 guide RNAs as a function of ribonucleoprotein (RNP) dose response. The guide RNAs from the screening that were most effective in targeting FOXP3 for gene editing are listed in Table 6.

TABLE 2
List of FOXP3 guide RNAs screened.

| | | | | | | Targetable |
|---|---|---|---|---|---|---|
| | Guide | | | | | by |
| | RNA | | Target | | Target | SpyCas9* |
| Guide | SEQ | | SEQ | PAM | Length | and/or |
| name | ID NO: | Target Sequence | ID NO: | Sequence | (in nt) | LPG10145 |
| SGN002770 | 699 | TTGGACAAGGACCCGATGCC | 2 | CAACCCCA | 20 | |
| SGN002771 | 700 | TGGACAAGGACCCGATGCCC | 4 | AACCCCAG | 20 | |
| SGN002772 | 701 | TGGGGTTGGGCATCGGGTCC | 6 | TTGTCCAA | 20 | |
| SGN002773 | 702 | AAGGACCCGATGCCCAACCC | 8 | CAGGCCTG | 20 | |
| SGN002774 | 703 | CAGGCCTGGGGTTGGGCATC | 10 | GGGTCCTT | 20 | SpyCas9 |
| SGN002775 | 704 | ATGCCCAACCCCAGGCCTGG | 12 | CAAGCCCT | 20 | |
| SGN002776 | 705 | TGCCCTTGGACAAGGACCCG | 14 | ATGCCCAA | 20 | |
| SGN002777 | 706 | CTTGGACAAGGACCCGATGC | 16 | CCAACCCC | 20 | |
| SGN002778 | 707 | TCCTCTTCTTCCTTGAACCC | 18 | CATGCCAC | 20 | |
| SGN002779 | 708 | TCTTCTTCCTTGAACCCCAT | 20 | GCCACCAT | 20 | |
| SGN002780 | 709 | CGCAGCCTGCCCTTGGACAA | 22 | GGACCCGA | 20 | |
| SGN002781 | 710 | GGAAGGGGCCGAGGGCTTGC | 24 | CAGGCCTG | 20 | |
| SGN002782 | 711 | GGCCTGGCAAGCCCTCGGCC | 26 | CCTTCCTT | 20 | |
| SGN002783 | 712 | GCAAGCCCTCGGCCCCTTCC | 28 | TTGGCCCT | 20 | |
| SGN002784 | 713 | ATGGGCCAAGGGCCAAGGAA | 30 | GGGGCCGA | 20 | SpyCas9 |
| SGN002785 | 714 | CTTGGCCCATCCCCAGGAGC | 32 | CTCGCCCA | 20 | |
| SGN002786 | 715 | CCTCGCCCAGCTGGAGGGCT | 34 | GCACCCAA | 20 | |
| SGN002787 | 716 | GTCTGAGGCTTTGGGTGCAG | 36 | CCCTCCAG | 20 | |
| SGN002788 | 717 | CAGGTCTGAGGCTTTGGGTG | 38 | CAGCCCTC | 20 | |
| SGN002789 | 718 | AAGGTTCCCCCTGGGCCCCG | 40 | GGCCCCCA | 20 | |
| SGN002790 | 719 | GAAGGTTCCCCCTGGGCCCC | 42 | GGGCCCCC | 20 | |
| SGN002791 | 720 | GCCCTGGAAGGTTCCCCCTG | 44 | GGCCCCGG | 20 | |
| SGN002792 | 721 | GGGCCCAGGGGGAACCTTCC | 46 | AGGGCCGA | 20 | |
| SGN002793 | 722 | AGATCTCGGCCCTGGAAGGT | 48 | TCCCCCTG | 20 | |
| SGN002794 | 723 | AAGATCTCGGCCCTGGAAGG | 50 | TTCCCCCT | 20 | |
| SGN002795 | 724 | GAAGATCTCGGCCCTGGAAG | 52 | GTTCCCCC | 20 | |
| SGN002796 | 725 | CGAAGATCTCGGCCCTGGAA | 54 | GGTTCCCC | 20 | |
| SGN002797 | 726 | AGGGCCGAGATCTTCGAGGC | 56 | GGGGCCCA | 20 | SpyCas9 |
| SGN002798 | 727 | GGGCCCCGCCTCGAAGATCT | 58 | CGGCCCTG | 20 | SpyCas9 |
| SGN002799 | 728 | GGGCCGAGATCTTCGAGGCG | 60 | GGGCCCAT | 20 | SpyCas9 |
| SGN002800 | 729 | TGGGCCCCGCCTCGAAGATC | 62 | TCGGCCCT | 20 | LPG10145 |
| SGN002801 | 730 | GAGATCTTCGAGGCGGGGCC | 64 | CATGCCTC | 20 | |
| SGN002802 | 731 | ATCTTCGAGGCGGGGCCCAT | 66 | GCCTCCTC | 20 | |
| SGN002803 | 732 | GCGGGGCCCATGCCTCCTCT | 68 | TCTTCCTT | 20 | |
| SGN003378 | 733 | CTTGCCAGGCCTGGGGTTGG | 70 | GGGTCCTT | 25 | SpyCas9 |
| | | GCATC | | | | |
| SGN003379 | 734 | ACCCGATGCCCAACCCCAGG | 72 | CAAGCCCT | 25 | |
| | | CCTGG | | | | |
| SGN003380 | 735 | GCCAAGGAAGGGGCCGAGG | 74 | CAGGCCTG | 25 | |
| | | GCTTGC | | | | |
| SGN003381 | 736 | AGCAGGTCTGAGGCTTTGGG | 76 | CCCTCCAG | 25 | |
| | | TGCAG | | | | |
| SGN003382 | 737 | TCTCGGCCCTGGAAGGTTCC | 78 | GGCCCCGG | 25 | |
| | | CCCTG | | | | |
| SGN003383 | 738 | CTCGAAGATCTCGGCCCTGG | 80 | CAGGCCTG | 25 | LPG10145 |
| | | AAGGT | | | | |
| SGN003384 | 739 | CCTCGAAGATCTCGGCCCTG | 82 | TTCCCCCT | 25 | |
| | | GAAGG | | | | |
| SGN005042 | 740 | TTGCCAGGCCTGGGGTTGGG | 84 | GGGTCCTT | 24 | SpyCas9 |
| | | CATC | | | | |
| SGN005043 | 741 | GCAGGTCTGAGGCTTTGGGT | 86 | CCCTCCAG | 24 | |
| | | GCAG | | | | |
| SGN005044 | 742 | CTCGAAGATCTCGGCCCTGG | 88 | TTCCCCCT | 24 | |
| | | AAGG | | | | |
| SGN005050 | 743 | AGCCCTCGGCCCCTTCCTTGG | 90 | TGGCCC | 25 | SpyCas9 |
| | | CCCT | | | | |
| SGN005051 | 744 | AGCTGGAGGGCTGCACCCAA | 92 | CAGACC | 25 | |
| | | AGCCT | | | | |
| SGN005052 | 745 | AGGCATGGGCCCCGCCTCGA | 94 | TCGGCC | 25 | |
| | | AGATC | | | | |
| SGN005053 | 746 | CAAGGGCCAAGGAAGGGGC | 96 | CTTGCC | 25 | |
| | | CGAGGG | | | | |
| SGN005054 | 747 | CCAACCCCAGGCCTGGCAAG | 98 | GGCCCC | 25 | |
| | | CCCTC | | | | |
| SGN005055 | 748 | CCCCAGCAGGTCTGAGGCTT | 100 | GCAGCC | 25 | |
| | | TGGGT | | | | |
| SGN005056 | 749 | CCCGATGCCCAACCCCAGGC | 102 | AAGCCC | 25 | |
| | | CTGGC | | | | |
| SGN005057 | 750 | CCGAGATCTTCGAGGCGGGG | 104 | GCCTCC | 25 | |
| | | CCCAT | | | | |
| SGN005058 | 751 | CCTCCTCTTCTTCCTTGAACC | 106 | GCCACC | 25 | |
| | | CCAT | | | | |
| SGN005059 | 752 | CCTGGCAAGCCCTCGGCCCC | 108 | TGGCCC | 25 | SpyCas9 |
| | | TTCCT | | | | |
| SGN005060 | 753 | CGGCCCCTTCCTTGGCCCTTG | 110 | ATCCCC | 25 | |
| | | GCCC | | | | |
| SGN005061 | 754 | CTCGCCCAGCTGGAGGGCTG | 112 | AAAGCC | 25 | |
| | | CACCC | | | | |
| SGN005062 | 755 | CTCGGCCCCTTCCTTGGCCCT | 114 | CCATCC | 25 | |
| | | TGGC | | | | |
| SGN005063 | 756 | CTGGGGGCCCGGGGCCCAGG | 116 | CCTTCC | 25 | |
| | | GGGAA | | | | |
| SGN005064 | 757 | GATCTCGGCCCTGGAAGGTT | 118 | TGGGCC | 25 | SpyCas9 |
| | | CCCCC | | | | |
| SGN005065 | 758 | GCACCCAAAGCCTCAGACCT | 120 | GGGCCC | 25 | SpyCas9 |
| | | GCTGG | | | | |
| SGN005066 | 759 | GCCCAACCCCAGGCCTGGCA | 122 | TCGGCC | 25 | LPG10145 |
| | | AGCCC | | | | |
| SGN005067 | 760 | GCCCTGGAAGGTTCCCCCTG | 124 | CGGGCC | 25 | SpyCas9 |
| | | GGCCC | | | | and |
| | | | | | | LPG10145 |
| SGN005068 | 761 | GGCCCATGCCTCCTCTTCTTC | 126 | AACCCC | 25 | |
| | | CTTG | | | | |
| SGN005069 | 762 | GGCCCTTGGCCCATCCCCAG | 128 | TCGCCC | 25 | |
| | | GAGCC | | | | |
| SGN005070 | 763 | GGGCCGAGATCTTCGAGGCG | 130 | CATGCC | 25 | |
| | | GGGCC | | | | |
| SGN005071 | 764 | GGGCGAGGCTCCTGGGGATG | 132 | AGGGCC | 25 | SpyCas9 |
| | | GGCCA | | | | |
| SGN005072 | 765 | GGGGCCCATGCCTCCTCTTCT | 134 | TGAACC | 25 | |
| | | TCCT | | | | |
| SGN005073 | 766 | GGGGTTCAAGGAAGAAGAG | 136 | TGGGCC | 25 | SpyCas9 |
| | | GAGGCA | | | | |
| SGN005074 | 767 | GGTTCAAGGAAGAAGAGGA | 138 | GGCCCC | 25 | |
| | | GGCATG | | | | |
| SGN005075 | 768 | TCAAGGAAGAAGAGGAGGC | 140 | CCCGCC | 25 | |
| | | ATGGGC | | | | |
| SGN005076 | 769 | TCCAGCTGGGCGAGGCTCCT | 142 | TGGGCC | 25 | SpyCas9 |
| | | GGGGA | | | | |
| SGN005077 | 770 | TCGAGGCGGGGCCCATGCCT | 144 | TCTTCC | 25 | |
| | | CCTCT | | | | |
| SGN005078 | 771 | TGGGTGCAGCCCTCCAGCTG | 146 | GGCTCC | 25 | |
| | | GGCGA | | | | |
| SGN005079 | 772 | TTCCAGGGCCGAGATCTTCG | 148 | GGGCCC | 25 | SpyCas9 |
| | | AGGCG | | | | |
| SGN005104 | 773 | AAGCCTCAGACCTGCTGGGG | 150 | GGGCCC | 25 | SpyCas9 |
| | | GCCCG | | | | |
| SGN005635 | 774 | CTTGCCAGGCCTGGGGTTGG | 152 | GGGTCCTT | 25 | SpyCas9 |
| | | GCATC | | | | |
| SGN005636 | 775 | TTGCCAGGCCTGGGGTTGGG | 154 | GGGTCCTT | 24 | SpyCas9 |
| | | CATC | | | | |
| SGN005637 | 693 | TGCCAGGCCTGGGGTTGGGC | 156 | GGGTCCTT | 23 | SpyCas9 |
| | | ATC | | | | |
| SGN005638 | 776 | GCCAGGCCTGGGGTTGGGCA | 158 | GGGTCCTT | 22 | SpyCas9 |
| | | TC | | | | |
| SGN005639 | 777 | AGCAGGTCTGAGGCTTTGGG | 160 | CCCTCCAG | 25 | |
| | | TGCAG | | | | |
| SGN005640 | 778 | GCAGGTCTGAGGCTTTGGGT | 162 | CCCTCCAG | 24 | |
| | | GCAG | | | | |
| SGN005641 | 694 | CAGGTCTGAGGCTTTGGGTG | 164 | CCCTCCAG | 23 | |
| | | CAG | | | | |
| SGN005642 | 779 | AGGTCTGAGGCTTTGGGTGC | 166 | CCCTCCAG | 22 | |
| | | AG | | | | |
| SGN005643 | 780 | TCTCGGCCCTGGAAGGTTCC | 168 | GGCCCCGG | 25 | |
| | | CCCTG | | | | |
| SGN005644 | 781 | CTCGGCCCTGGAAGGTTCCC | 170 | GGCCCCGG | 24 | |
| | | CCTG | | | | |
| SGN005645 | 782 | TCGGCCCTGGAAGGTTCCCC | 172 | GGCCCCGG | 23 | |
| | | CTG | | | | |
| SGN005646 | 783 | CGGCCCTGGAAGGTTCCCCC | 174 | GGCCCCGG | 22 | |
| | | TG | | | | |
| SGN005647 | 784 | CCTCGAAGATCTCGGCCCTG | 176 | TTCCCCCT | 25 | |
| | | GAAGG | | | | |
| SGN005648 | 785 | CTCGAAGATCTCGGCCCTGG | 178 | TTCCCCCT | 24 | |
| | | AAGG | | | | |
| SGN005649 | 695 | TCGAAGATCTCGGCCCTGGA | 180 | TTCCCCCT | 23 | |
| | | AGG | | | | |
| SGN005650 | 786 | CGAAGATCTCGGCCCTGGAA | 182 | TTCCCCCT | 22 | |
| | | GG | | | | |
| SGN005651 | 787 | CTCGGCCCTGGAAGGTTCCC | 184 | GGCCCCGG | 24 | |
| | | CCTG | | | | |
| SGN005683 | 788 | CTTGCCAGGCCTGGGGTTGG | 186 | GGGTCCTT | 25 | SpyCas9 |
| | | GCATC | | | | |
| SGN005684 | 789 | CTTGCCAGGCCTGGGGTTGG | 186 | GGGTCCTT | 25 | SpyCas9 |
| | | GCATC | | | | |
| SGN005685 | 790 | CTTGCCAGGCCTGGGGTTGG | 186 | GGGTCCTT | 25 | SpyCas9 |
| | | GCATC | | | | |
| SGN005686 | 791 | CTTGCCAGGCCTGGGGTTGG | 186 | GGGTCCTT | 25 | SpyCas9 |
| | | GCATC | | | | |
| SGN005687 | 792 | CTTGCCAGGCCTGGGGTTGG | 186 | GGGTCCTT | 25 | SpyCas9 |
| | | GCATC | | | | |
| SGN005688 | 793 | CTTGCCAGGCCTGGGGTTGG | 186 | GGGTCCTT | 25 | SpyCas9 |
| | | GCATC | | | | |
| SGN005689 | 794 | CTTGCCAGGCCTGGGGTTGG | 186 | GGGTCCTT | 25 | SpyCas9 |
| | | GCATC | | | | |
| SGN005690 | 795 | CTTGCCAGGCCTGGGGTTGG | 186 | GGGTCCTT | 25 | SpyCas9 |
| | | GCATC | | | | |
| SGN005691 | 796 | CTTGCCAGGCCTGGGGTTGG | 186 | GGGTCCTT | 25 | SpyCas9 |
| | | GCATC | | | | |
| SGN005992 | 797 | AGCAGGTCTGAGGCTTTGGG | 188 | CCCTCCAG | 25 | |
| | | TGCAG | | | | |
| SGN005693 | 798 | AGCAGGTCTGAGGCTTTGGG | 188 | CCCTCCAG | 25 | |
| | | TGCAG | | | | |
| SGN005694 | 799 | AGCAGGTCTGAGGCTTTGGG | 188 | CCCTCCAG | 25 | |
| | | TGCAG | | | | |
| SGN005695 | 800 | AGCAGGTCTGAGGCTTTGGG | 188 | CCCTCCAG | 25 | |
| | | TGCAG | | | | |
| SGN005696 | 801 | AGCAGGTCTGAGGCTTTGGG | 188 | CCCTCCAG | 25 | |
| | | TGCAG | | | | |
| SGN005697 | 802 | AGCAGGTCTGAGGCTTTGGG | 188 | CCCTCCAG | 25 | |
| | | TGCAG | | | | |
| SGN005698 | 803 | AGCAGGTCTGAGGCTTTGGG | 188 | CCCTCCAG | 25 | |
| | | TGCAG | | | | |
| SGN005699 | 804 | AGCAGGTCTGAGGCTTTGGG | 188 | CCCTCCAG | 25 | |
| | | TGCAG | | | | |
| SGN005700 | 805 | AGCAGGTCTGAGGCTTTGGG | 188 | CCCTCCAG | 25 | |
| | | TGCAG | | | | |
| SGN005701 | 806 | TCTCGGCCCTGGAAGGTTCC | 190 | GGCCCCGG | 25 | |
| | | CCCTG | | | | |
| SGN005702 | 807 | TCTCGGCCCTGGAAGGTTCC | 190 | GGCCCCGG | 25 | |
| | | CCCTG | | | | |
| SGN005703 | 808 | TCTCGGCCCTGGAAGGTTCC | 190 | GGCCCCGG | 25 | |
| | | CCCTG | | | | |
| SGN005704 | 809 | TCTCGGCCCTGGAAGGTTCC | 190 | GGCCCCGG | 25 | |
| | | CCCTG | | | | |
| SGN005705 | 810 | TCTCGGCCCTGGAAGGTTCC | 190 | GGCCCCGG | 25 | |
| | | CCCTG | | | | |
| SGN005706 | 811 | TCTCGGCCCTGGAAGGTTCC | 190 | GGCCCCGG | 25 | |
| | | CCCTG | | | | |
| SGN005707 | 696 | TCTCGGCCCTGGAAGGTTCC | 190 | GGCCCCGG | 25 | |
| | | CCCTG | | | | |
| SGN005708 | 812 | TCTCGGCCCTGGAAGGTTCC | 190 | GGCCCCGG | 25 | |
| | | CCCTG | | | | |
| SGN005709 | 813 | TCTCGGCCCTGGAAGGTTCC | 190 | GGCCCCGG | 25 | |
| | | CCCTG | | | | |
| SGN005710 | 814 | CCTCGAAGATCTCGGCCCTG | 192 | TTCCCCCT | 25 | |
| | | GAAGG | | | | |
| SGN005711 | 815 | CCTCGAAGATCTCGGCCCTG | 192 | TTCCCCCT | 25 | |
| | | GAAGG | | | | |
| SGN005712 | 816 | CCTCGAAGATCTCGGCCCTG | 192 | TTCCCCCT | 25 | |
| | | GAAGG | | | | |
| SGN005713 | 817 | CCTCGAAGATCTCGGCCCTG | 192 | TTCCCCCT | 25 | |
| | | GAAGG | | | | |
| SGN005714 | 818 | CCTCGAAGATCTCGGCCCTG | 192 | TTCCCCCT | 25 | |
| | | GAAGG | | | | |
| SGN005715 | 819 | CCTCGAAGATCTCGGCCCTG | 192 | TTCCCCCT | 25 | |
| | | GAAGG | | | | |
| SGN005716 | 820 | CCTCGAAGATCTCGGCCCTG | 192 | TTCCCCCT | 25 | |
| | | GAAGG | | | | |
| SGN005717 | 821 | CCTCGAAGATCTCGGCCCTG | 192 | TTCCCCCT | 25 | |
| | | GAAGG | | | | |
| SGN005718 | 822 | CCTCGAAGATCTCGGCCCTG | 192 | TTCCCCCT | 25 | |
| | | GAAGG | | | | |
| SGN006269 | 823 | GGGGTTCAAGGAAGAAGAG | 194 | TGGGCC | 25 | SpyCas9 |
| | | GAGGCA | | | | |
| SGN006270 | 824 | GGGTTCAAGGAAGAAGAGG | 196 | TGGGCC | 24 | SpyCas9 |
| | | AGGCA | | | | |
| SGN006271 | 697 | GGTTCAAGGAAGAAGAGGA | 198 | TGGGCC | 23 | SpyCas9 |
| | | GGCA | | | | |
| SGN006272 | 698 | GGGGTTCAAGGAAGAAGAG | 194 | TGGGCC | 25 | SpyCas9 |
| | | GAGGCA | | | | |
| SGN006273 | 825 | GGGTTCAAGGAAGAAGAGG | 196 | TGGGCC | 24 | SpyCas9 |
| | | AGGCA | | | | |
| SGN006274 | 826 | GGTTCAAGGAAGAAGAGGA | 198 | TGGGCC | 23 | SpyCas9 |
| | | GGCA | | | | |
| SGN006275 | 827 | TTGCCAGGCCTGGGGTTGGG | 200 | GGGTCCTT | 24 | SpyCas9 |
| | | CATC | | | | |
| SGN006276 | 828 | TGCCAGGCCTGGGGTTGGGC | 202 | GGGTCCTT | 23 | SpyCas9 |
| | | ATC | | | | |
| SGN006277 | 829 | GCAGGTCTGAGGCTTTGGGT | 204 | CCCTCCAG | 24 | |
| | | GCAG | | | | |
| SGN006278 | 830 | CAGGTCTGAGGCTTTGGGTG | 206 | CCCTCCAG | 23 | |
| | | CAG | | | | |
| SGN006279 | 831 | CTCGGCCCTGGAAGGTTCCC | 208 | GGCCCCGG | 24 | |
| | | CCTG | | | | |
| SGN006280 | 832 | TCGGCCCTGGAAGGTTCCCC | 210 | GGCCCCGG | 23 | |
| | | CTG | | | | |
| SGN006281 | 833 | CTCGAAGATCTCGGCCCTGG | 212 | TTCCCCCT | 24 | |
| | | AAGG | | | | |
| SGN006282 | 834 | TCGAAGATCTCGGCCCTGGA | 214 | TTCCCCCT | 23 | |
| | | AGG | | | | |

*If the FOXP3 target sequence can be targeted by S. pyogenes Cas9 (SpyCas9) and/or LPG10145
RGN, the respective polypeptide(s) is indicated.

TABLE 3
Gene editing of FOXP3 gene with indicated guide RNA.

| | | Target | Average |
|---|---|---|---|
| Guide | | Length (in | Percent |
| Name | Cell Line | nucleotides) | Indels |
| SGN002770 | PBMC-001 | 20 | 0 |
| SGN002770 | PBMC-003 | 20 | 0 |
| SGN002771 | PBMC-001 | 20 | 0.18 |
| SGN002771 | PBMC-003 | 20 | 0 |
| SGN002772 | PBMC-001 | 20 | 0 |
| SGN002772 | PBMC-003 | 20 | 0 |
| SGN002773 | PBMC-001 | 20 | 1.12 |
| SGN002773 | PBMC-003 | 20 | 0.16 |
| SGN002774 | CD4-002 | 20 | 16.2 |
| SGN002774 | CD4-003 | 20 | 8.15 |
| SGN002774 | PBMC-001 | 20 | 6.74 |
| SGN002774 | PBMC-003 | 20 | 1.17 |
| SGN002774 | TCell-004 | 20 | 16.35 |
| SGN002775 | CD4-002 | 20 | 32.18 |
| SGN002775 | CD4-003 | 20 | 16.39 |
| SGN002775 | PBMC-001 | 20 | 14.7 |
| SGN002775 | PBMC-003 | 20 | 2.88 |
| SGN002775 | TCell-004 | 20 | 32.06 |
| SGN002776 | PBMC-001 | 20 | 0.21 |
| SGN002776 | PBMC-003 | 20 | 0.08 |
| SGN002777 | PBMC-001 | 20 | 0.61 |
| SGN002777 | PBMC-003 | 20 | 0.14 |
| SGN002778 | PBMC-001 | 20 | 0 |
| SGN002778 | PBMC-003 | 20 | 0.3 |
| SGN002779 | PBMC-001 | 20 | 0.42 |
| SGN002779 | PBMC-003 | 20 | 0.13 |
| SGN002780 | PBMC-001 | 20 | 1.15 |
| SGN002780 | PBMC-003 | 20 | 0.07 |
| SGN002781 | CD4-002 | 20 | 15.01 |
| SGN002781 | CD4-003 | 20 | 4.99 |
| SGN002781 | PBMC-001 | 20 | 6.15 |
| SGN002781 | PBMC-003 | 20 | 0.57 |
| SGN002781 | TCell-004 | 20 | 7.4 |
| SGN002782 | PBMC-001 | 20 | 0 |
| SGN002782 | PBMC-003 | 20 | 0 |
| SGN002783 | PBMC-001 | 20 | 0.72 |
| SGN002783 | PBMC-003 | 20 | 0.12 |
| SGN002784 | PBMC-001 | 20 | 0 |
| SGN002784 | PBMC-003 | 20 | 0 |
| SGN002785 | CD4-002 | 20 | 1.81 |
| SGN002785 | PBMC-001 | 20 | 2.25 |
| SGN002785 | PBMC-003 | 20 | 0.13 |
| SGN002785 | TCell-004 | 20 | 1.52 |
| SGN002786 | PBMC-001 | 20 | 0.06 |
| SGN002786 | PBMC-003 | 20 | 0 |
| SGN002787 | CD4-002 | 20 | 56.02 |
| SGN002787 | CD4-003 | 20 | 32.77 |
| SGN002787 | PBMC-001 | 20 | 35.47 |
| SGN002787 | PBMC-003 | 20 | 16.91 |
| SGN002787 | TCell-004 | 20 | 47.68 |
| SGN002788 | CD4-002 | 20 | 6.05 |
| SGN002788 | PBMC-001 | 20 | 5.6 |
| SGN002788 | PBMC-003 | 20 | 0.68 |
| SGN002788 | TCell-004 | 20 | 5.06 |
| SGN002789 | PBMC-001 | 20 | 0.53 |
| SGN002789 | PBMC-003 | 20 | 0.11 |
| SGN002790 | PBMC-001 | 20 | 0.8 |
| SGN002790 | PBMC-003 | 20 | 0.38 |
| SGN002791 | CD4-002 | 20 | 34.21 |
| SGN002791 | CD4-003 | 20 | 14.18 |
| SGN002791 | PBMC-001 | 20 | 31.02 |
| SGN002791 | PBMC-003 | 20 | 1.59 |
| SGN002791 | TCell-004 | 20 | 23.7 |
| SGN002792 | PBMC-001 | 20 | 0.49 |
| SGN002792 | PBMC-003 | 20 | 0.35 |
| SGN002793 | CD4-003 | 20 | 4.39 |
| SGN002793 | PBMC-001 | 20 | 6.81 |
| SGN002793 | PBMC-003 | 20 | 1.49 |
| SGN002793 | TCell-004 | 20 | 6.69 |
| SGN002794 | CD4-002 | 20 | 36.56 |
| SGN002794 | CD4-003 | 20 | 19.34 |
| SGN002794 | PBMC-001 | 20 | 25.49 |
| SGN002794 | PBMC-003 | 20 | 2.42 |
| SGN002794 | TCell-004 | 20 | 42.12 |
| SGN002795 | CD4-002 | 20 | 0.93 |
| SGN002795 | PBMC-001 | 20 | 2.48 |
| SGN002795 | PBMC-003 | 20 | 0.33 |
| SGN002795 | TCell-004 | 20 | 0.65 |
| SGN002796 | PBMC-001 | 20 | 0.1 |
| SGN002796 | PBMC-003 | 20 | 0.38 |
| SGN002797 | PBMC-001 | 20 | 0 |
| SGN002797 | PBMC-003 | 20 | 0 |
| SGN002798 | CD4-002 | 20 | 6.04 |
| SGN002798 | PBMC-001 | 20 | 2.25 |
| SGN002798 | PBMC-003 | 20 | 0.55 |
| SGN002798 | TCell-004 | 20 | 4.91 |
| SGN002799 | PBMC-001 | 20 | 0 |
| SGN002799 | PBMC-003 | 20 | 0 |
| SGN002800 | CD4-002 | 20 | 2.88 |
| SGN002800 | PBMC-001 | 20 | 3.53 |
| SGN002800 | PBMC-003 | 20 | 0.1 |
| SGN002800 | TCell-004 | 20 | 1.55 |
| SGN002801 | PBMC-001 | 20 | 0.39 |
| SGN002801 | PBMC-003 | 20 | 0.04 |
| SGN002802 | PBMC-001 | 20 | 0.15 |
| SGN002802 | PBMC-003 | 20 | 0 |
| SGN002803 | PBMC-001 | 20 | 0 |
| SGN002803 | PBMC-003 | 20 | 0 |
| SGN003378 | CD4-003 | 25 | 62.49 |
| SGN003378 | CD4-004 | 25 | 77.61 |
| SGN003378 | CD4-005 | 25 | 71.92 |
| SGN003378 | CD4-006 | 25 | 62.28 |
| SGN003378 | CD4-007 | 25 | 73.38 |
| SGN003378 | Tcell-001 | 25 | 73.98 |
| SGN003378 | Tcell-002 | 25 | 68.09 |
| SGN003378 | Tcell-003 | 25 | 63.4 |
| SGN003378 | TCell-006 | 25 | 65.68 |
| SGN003378 | TCell-008 | 25 | 73.22 |
| SGN003379 | CD4-003 | 25 | 38.4 |
| SGN003379 | CD4-004 | 25 | 57.38 |
| SGN003379 | CD4-005 | 25 | 54.62 |
| SGN003379 | CD4-006 | 25 | 48.22 |
| SGN003379 | CD4-007 | 25 | 32.01 |
| SGN003379 | TCell-006 | 25 | 61.04 |
| SGN003380 | CD4-003 | 25 | 0 |
| SGN003380 | CD4-004 | 25 | 61.19 |
| SGN003380 | CD4-005 | 25 | 52.98 |
| SGN003380 | CD4-006 | 25 | 48.39 |
| SGN003380 | CD4-007 | 25 | 39.23 |
| SGN003381 | CD4-003 | 25 | 72.69 |
| SGN003381 | CD4-004 | 25 | 80.46 |
| SGN003381 | CD4-005 | 25 | 77.9 |
| SGN003381 | CD4-006 | 25 | 48.57 |
| SGN003381 | CD4-007 | 25 | 84.95 |
| SGN003381 | Tcell-001 | 25 | 87.35 |
| SGN003381 | Tcell-002 | 25 | 80.65 |
| SGN003381 | Tcell-003 | 25 | 75.65 |
| SGN003381 | TCell-006 | 25 | 64.11 |
| SGN003381 | TCell-008 | 25 | 64.94 |
| SGN003382 | CD4-003 | 25 | 0.12 |
| SGN003382 | CD4-004 | 25 | 83.26 |
| SGN003382 | CD4-005 | 25 | 80.11 |
| SGN003382 | CD4-006 | 25 | 71.75 |
| SGN003382 | CD4-007 | 25 | 59.81 |
| SGN003382 | Tcell-001 | 25 | 84.2 |
| SGN003382 | Tcell-002 | 25 | 77.54 |
| SGN003382 | Tcell-003 | 25 | 70.99 |
| SGN003382 | TCell-008 | 25 | 82 |
| SGN003383 | CD4-003 | 25 | 43.57 |
| SGN003383 | CD4-004 | 25 | 32.8 |
| SGN003383 | CD4-005 | 25 | 27.41 |
| SGN003383 | CD4-006 | 25 | 26.98 |
| SGN003383 | CD4-007 | 25 | 17.47 |
| SGN003383 | TCell-006 | 25 | 38.85 |
| SGN003384 | CD4-003 | 25 | 62.24 |
| SGN003384 | CD4-004 | 25 | 76.6 |
| SGN003384 | CD4-005 | 25 | 71.08 |
| SGN003384 | CD4-006 | 25 | 58.19 |
| SGN003384 | CD4-007 | 25 | 84.63 |
| SGN003384 | Tcell-001 | 25 | 68.11 |
| SGN003384 | Tcell-002 | 25 | 61.03 |
| SGN003384 | Tcell-003 | 25 | 51.44 |
| SGN003384 | TCell-006 | 25 | 51.42 |
| SGN003384 | TCell-008 | 25 | 78.37 |
| SGN005042 | TCell-008 | 24 | 30.56 |
| SGN005043 | TCell-008 | 24 | 55.36 |
| SGN005044 | TCell-008 | 24 | 58.66 |
| SGN005050 | CD4-006 | 25 | 3.54 |
| SGN005052 | CD4-006 | 25 | 0 |
| SGN005053 | CD4-006 | 25 | 0.96 |
| SGN005055 | CD4-006 | 25 | 0 |
| SGN005056 | CD4-006 | 25 | 0.26 |
| SGN005058 | CD4-006 | 25 | 32.33 |
| SGN005060 | CD4-006 | 25 | 0 |
| SGN005061 | CD4-006 | 25 | 0.2 |
| SGN005062 | CD4-006 | 25 | 0 |
| SGN005063 | CD4-006 | 25 | 0 |
| SGN005066 | CD4-006 | 25 | 0 |
| SGN005067 | CD4-006 | 25 | 14.06 |
| SGN005068 | CD4-006 | 25 | 4.75 |
| SGN005069 | CD4-006 | 25 | 0 |
| SGN005070 | CD4-006 | 25 | 0 |
| SGN005071 | CD4-006 | 25 | 0 |
| SGN005072 | CD4-006 | 25 | 3.89 |
| SGN005073 | Tcell-001 | 25 | 85.21 |
| SGN005073 | Tcell-002 | 25 | 78 |
| SGN005073 | Tcell-003 | 25 | 74.9 |
| SGN005073 | TCell-008 | 25 | 89.32 |
| SGN005074 | CD4-006 | 25 | 0 |
| SGN005075 | CD4-006 | 25 | 0 |
| SGN005076 | CD4-006 | 25 | 0.92 |
| SGN005104 | CD4-006 | 25 | 25.1 |
| SGN005635 | TCell-008 | 25 | 68.12 |
| SGN005636 | TCell-008 | 24 | 68.31 |
| SGN005637 | Tcell-001 | 23 | 69.79 |
| SGN005637 | Tcell-002 | 23 | 66.45 |
| SGN005637 | Tcell-003 | 23 | 59.77 |
| SGN005637 | TCell-008 | 23 | 76.52 |
| SGN005638 | TCell-008 | 22 | 19.49 |
| SGN005639 | TCell-008 | 25 | 80.37 |
| SGN005640 | TCell-008 | 24 | 82.08 |
| SGN005641 | Tcell-001 | 23 | 91.53 |
| SGN005641 | Tcell-002 | 23 | 89.81 |
| SGN005641 | Tcell-003 | 23 | 85.34 |
| SGN005641 | TCell-008 | 23 | 85.1 |
| SGN005642 | TCell-008 | 22 | 0.08 |
| SGN005643 | TCell-008 | 25 | 79.7 |
| SGN005644 | TCell-008 | 24 | 69.06 |
| SGN005645 | TCell-008 | 23 | 61.67 |
| SGN005646 | TCell-008 | 22 | 46.68 |
| SGN005647 | TCell-008 | 25 | 81.82 |
| SGN005648 | TCell-008 | 24 | 82.13 |
| SGN005649 | Tcell-001 | 23 | 67.15 |
| SGN005649 | Tcell-002 | 23 | 67.06 |
| SGN005649 | Tcell-003 | 23 | 61.17 |
| SGN005649 | TCell-008 | 23 | 84.63 |
| SGN005650 | TCell-008 | 22 | 0.12 |
| SGN005651 | TCell-008 | 24 | 35.55 |
| SGN005683 | TCell-008 | 25 | 59.58 |
| SGN005684 | TCell-008 | 25 | 33.99 |
| SGN005685 | TCell-008 | 25 | 41.82 |
| SGN005686 | TCell-008 | 25 | 49.67 |
| SGN005687 | TCell-008 | 25 | 27.22 |
| SGN005688 | TCell-008 | 25 | 31.47 |
| SGN005689 | TCell-008 | 25 | 71.61 |
| SGN005690 | TCell-008 | 25 | 32.29 |
| SGN005691 | TCell-008 | 25 | 31.5 |
| SGN005692 | TCell-008 | 25 | 79.85 |
| SGN005693 | TCell-008 | 25 | 72.84 |
| SGN005694 | TCell-008 | 25 | 70.33 |
| SGN005695 | TCell-008 | 25 | 67.82 |
| SGN005696 | TCell-008 | 25 | 63.54 |
| SGN005697 | TCell-008 | 25 | 65.89 |
| SGN005698 | TCell-008 | 25 | 80.06 |
| SGN005699 | TCell-008 | 25 | 72.14 |
| SGN005700 | TCell-008 | 25 | 66.12 |
| SGN005701 | TCell-008 | 25 | 73.02 |
| SGN005702 | TCell-008 | 25 | 56.16 |
| SGN005703 | TCell-008 | 25 | 58.73 |
| SGN005704 | TCell-008 | 25 | 70.04 |
| SGN005705 | TCell-008 | 25 | 54.1 |
| SGN005706 | TCell-008 | 25 | 56.93 |
| SGN005707 | Tcell-001 | 25 | 79.46 |
| SGN005707 | Tcell-002 | 25 | 81.41 |
| SGN005707 | Tcell-003 | 25 | 69.26 |
| SGN005707 | TCell-008 | 25 | 80.8 |
| SGN005708 | TCell-008 | 25 | 57.91 |
| SGN005709 | TCell-008 | 25 | 56.8 |
| SGN005710 | TCell-008 | 25 | 63.59 |
| SGN005711 | TCell-008 | 25 | 48.86 |
| SGN005712 | TCell-008 | 25 | 59.33 |
| SGN005713 | TCell-008 | 25 | 51.4 |
| SGN005714 | TCell-008 | 25 | 44.74 |
| SGN005715 | TCell-008 | 25 | 53.37 |
| SGN005716 | TCell-008 | 25 | 61.66 |
| SGN005717 | TCell-008 | 25 | 35.59 |
| SGN005718 | TCell-008 | 25 | 53.17 |
| SGN006269 | TCell-008 | 25 | 87.13 |
| SGN006270 | TCell-008 | 24 | 81.15 |
| SGN006271 | Tcell-001 | 23 | 69.32 |
| SGN006271 | Tcell-002 | 23 | 69.1 |
| SGN006271 | Tcell-003 | 23 | 62.68 |
| SGN006271 | TCell-008 | 23 | 85.53 |
| SGN006272 | Tcell-001 | 25 | 62.34 |
| SGN006272 | Tcell-002 | 25 | 61.39 |
| SGN006272 | Tcell-003 | 25 | 55.22 |
| SGN006272 | TCell-008 | 25 | 82 |
| SGN006273 | TCell-008 | 24 | 71.95 |
| SGN006274 | TCell-008 | 23 | 75.46 |
| SGN006275 | TCell-008 | 24 | 60.63 |
| SGN006276 | TCell-008 | 23 | 64.65 |
| SGN006277 | TCell-008 | 24 | 80.19 |
| SGN006278 | TCell-008 | 23 | 79.39 |
| SGN006279 | TCell-008 | 24 | 57.87 |
| SGN006280 | TCell-008 | 23 | 0.11 |
| SGN006281 | TCell-008 | 24 | 20.06 |
| SGN006282 | TCell-008 | 23 | 45.54 |

TABLE 4
Primer sets for FOXP3 gene amplifications

| Primer Set | Left | Right |
|---|---|---|
| FOXP3-1 | TCGTCGGCAGCGTCAGATGTGTATA | GTCTCGTGGGCTCGGAGATGTGTAT |
| | AGAGACAGGCTTTGACCAGAGG | AAGAGACAGTCAAGGAAGAAGA |
| | AGTGTC (SEQ ID NO: 215) | GGAGGCA (SEQ ID NO: 216) |
| FOXP3-2 | TCGTCGGCAGCGTCAGATGTGTATA | GTCTCGTGGGCTCGGAGATGTGTAT |
| | AGAGACAGCCTATTGTCTACGC | AAGAGACAGCCAGTGCCACAGTA |
| | AGCCTG (SEQ ID NO: 217) | AAGGTC (SEQ ID NO: 218) |
| FOXP3-Exon1 | TCGTCGGCAGCGTCAGATGTGTATS | GTCTCGTGGGCTCGGAGATGTGTAT |
| | AGAGACAGGCTTTGACCAGAGG | AAGAGACAGCCAGTGCCACAGTA |
| | AGTGTC (SEQ ID NO: 219) | AAGGTC (SEQ ID NO: 220) |

TABLE 5
Lead guide RNA dose response data in multiple donors.

| | | RNP | |
|---|---|---|---|
| Guide | | Concentration | Percent |
| Name | Cell Line | (pmol) | Indels |
| SGN005637 | Tcell-001 | 20 | 46.77 |
| SGN005637 | Tcell-001 | 20 | 46.13 |
| SGN005637 | Tcell-001 | 20 | 45.39 |
| SGN005637 | Tcell-001 | 40 | 76.82 |
| SGN005637 | Tcell-001 | 40 | 77.06 |
| SGN005637 | Tcell-001 | 40 | 77.29 |
| SGN005637 | Tcell-001 | 60 | 85.96 |
| SGN005637 | Tcell-001 | 60 | 86.29 |
| SGN005637 | Tcell-001 | 60 | 87.67 |
| SGN005637 | Tcell-001 | 80 | 91.50 |
| SGN005637 | Tcell-001 | 80 | 92.06 |
| SGN005637 | Tcell-001 | 80 | 91.73 |
| SGN005641 | Tcell-001 | 20 | 86.46 |
| SGN005641 | Tcell-001 | 20 | 86.17 |
| SGN005641 | Tcell-001 | 20 | 84.54 |
| SGN005641 | Tcell-001 | 40 | 93.38 |
| SGN005641 | Tcell-001 | 40 | 93.29 |
| SGN005641 | Tcell-001 | 40 | 93.84 |
| SGN005641 | Tcell-001 | 60 | 93.88 |
| SGN005641 | Tcell-001 | 60 | 92.96 |
| SGN005641 | Tcell-001 | 60 | 94.46 |
| SGN005641 | Tcell-001 | 80 | 94.091 |
| SGN005641 | Tcell-001 | 80 | 93.69 |
| SGN005641 | Tcell-001 | 80 | 95.22 |
| SGN005707 | Tcell-001 | 20 | 59.08 |
| SGN005707 | Tcell-001 | 20 | 58.08 |
| SGN005707 | Tcell-001 | 20 | 60.47 |
| SGN005707 | Tcell-001 | 40 | 86.91 |
| SGN005707 | Tcell-001 | 40 | 83.20 |
| SGN005707 | Tcell-001 | 40 | 85.83 |
| SGN005707 | Tcell-001 | 60 | 91.57 |
| SGN005707 | Tcell-001 | 60 | 90.55 |
| SGN005707 | Tcell-001 | 60 | 93.31 |
| SGN005707 | Tcell-001 | 80 | 92.83 |
| SGN005707 | Tcell-001 | 80 | 94.18 |
| SGN005707 | Tcell-001 | 80 | 95.34 |
| SGN005649 | Tcell-001 | 20 | 23.60 |
| SGN005649 | Tcell-001 | 20 | 21.86 |
| SGN005649 | Tcell-001 | 20 | 21.92 |
| SGN005649 | Tcell-001 | 40 | 67.93 |
| SGN005649 | Tcell-001 | 40 | 68.05 |
| SGN005649 | Tcell-001 | 40 | 69.06 |
| SGN005649 | Tcell-001 | 60 | 83.97 |
| SGN005649 | Tcell-001 | 60 | 84.09 |
| SGN005649 | Tcell-001 | 60 | 83.99 |
| SGN005649 | Tcell-001 | 80 | 89.23 |
| SGN005649 | Tcell-001 | 80 | 88.75 |
| SGN005649 | Tcell-001 | 80 | 90.70 |
| SGN006271 | Tcell-001 | 20 | 34.75 |
| SGN006271 | Tcell-001 | 20 | 34.80 |
| SGN006271 | Tcell-001 | 20 | 34.63 |
| SGN006271 | Tcell-001 | 40 | 70.99 |
| SGN006271 | Tcell-001 | 40 | 70.94 |
| SGN006271 | Tcell-001 | 40 | 69.79 |
| SGN006271 | Tcell-001 | 60 | 83.12 |
| SGN006271 | Tcell-001 | 60 | 82.96 |
| SGN006271 | Tcell-001 | 60 | 82.55 |
| SGN006271 | Tcell-001 | 80 | 89.12 |
| SGN006271 | Tcell-001 | 80 | 90.21 |
| SGN006271 | Tcell-001 | 80 | 91.05 |
| SGN006272 | Tcell-001 | 20 | 23.28 |
| SGN006272 | Tcell-001 | 20 | 25.02 |
| SGN006272 | Tcell-001 | 20 | 24.99 |
| SGN006272 | Tcell-001 | 40 | 59.02 |
| SGN006272 | Tcell-001 | 40 | 58.49 |
| SGN006272 | Tcell-001 | 40 | 58.06 |
| SGN006272 | Tcell-001 | 60 | 81.72 |
| SGN006272 | Tcell-001 | 60 | 77.91 |
| SGN006272 | Tcell-001 | 60 | 81.10 |
| SGN006272 | Tcell-001 | 80 | 88.31 |
| SGN006272 | Tcell-001 | 80 | 88.66 |
| SGN006272 | Tcell-001 | 80 | 89.00 |
| SGN003156 | Tcell-002 | 20 | 70.28 |
| SGN005637 | Tcell-002 | 20 | 35.60 |
| SGN005637 | Tcell-002 | 20 | 34.80 |
| SGN005637 | Tcell-002 | 20 | 35.43 |
| SGN005637 | Tcell-002 | 40 | 71.30 |
| SGN005637 | Tcell-002 | 40 | 70.97 |
| SGN005637 | Tcell-002 | 40 | 72.94 |
| SGN005637 | Tcell-002 | 60 | 83.56 |
| SGN005637 | Tcell-002 | 60 | 83.69 |
| SGN005637 | Tcell-002 | 60 | 82.45 |
| SGN005637 | Tcell-002 | 80 | 87.97 |
| SGN005637 | Tcell-002 | 80 | 88.61 |
| SGN005637 | Tcell-002 | 80 | 89.67 |
| SGN005641 | Tcell-002 | 20 | 81.88 |
| SGN005641 | Tcell-002 | 20 | 82.94 |
| SGN005641 | Tcell-002 | 20 | 79.86 |
| SGN005641 | Tcell-002 | 40 | 90.48 |
| SGN005641 | Tcell-002 | 40 | 90.26 |
| SGN005641 | Tcell-002 | 40 | 91.87 |
| SGN005641 | Tcell-002 | 60 | 91.28 |
| SGN005641 | Tcell-002 | 60 | 92.20 |
| SGN005641 | Tcell-002 | 60 | 93.28 |
| SGN005641 | Tcell-002 | 80 | 91.81 |
| SGN005641 | Tcell-002 | 80 | 92.20 |
| SGN005641 | Tcell-002 | 80 | 93.97 |
| SGN005707 | Tcell-002 | 20 | 59.69 |
| SGN005707 | Tcell-002 | 20 | 58.38 |
| SGN005707 | Tcell-002 | 20 | 56.95 |
| SGN005707 | Tcell-002 | 40 | 85.24 |
| SGN005707 | Tcell-002 | 40 | 84.54 |
| SGN005707 | Tcell-002 | 40 | 85.90 |
| SGN005707 | Tcell-002 | 60 | 92.91 |
| SGN005707 | Tcell-002 | 60 | 92.20 |
| SGN005707 | Tcell-002 | 60 | 93.41 |
| SGN005707 | Tcell-002 | 80 | 93.56 |
| SGN005707 | Tcell-002 | 80 | 93.27 |
| SGN005707 | Tcell-002 | 80 | 94.81 |
| SGN005649 | Tcell-002 | 20 | 21.89 |
| SGN005649 | Tcell-002 | 20 | 22.78 |
| SGN005649 | Tcell-002 | 20 | 22.07 |
| SGN005649 | Tcell-002 | 40 | 67.29 |
| SGN005649 | Tcell-002 | 40 | 67.71 |
| SGN005649 | Tcell-002 | 40 | 67.32 |
| SGN005649 | Tcell-002 | 60 | 83.66 |
| SGN005649 | Tcell-002 | 60 | 85.14 |
| SGN005649 | Tcell-002 | 60 | 83.93 |
| SGN005649 | Tcell-002 | 80 | 90.31 |
| SGN005649 | Tcell-002 | 80 | 89.41 |
| SGN005649 | Tcell-002 | 80 | 91.02 |
| SGN006271 | Tcell-002 | 20 | 33.69 |
| SGN006271 | Tcell-002 | 20 | 31.84 |
| SGN006271 | Tcell-002 | 20 | 34.10 |
| SGN006271 | Tcell-002 | 40 | 68.60 |
| SGN006271 | Tcell-002 | 40 | 67.94 |
| SGN006271 | Tcell-002 | 40 | 70.60 |
| SGN006271 | Tcell-002 | 60 | 84.39 |
| SGN006271 | Tcell-002 | 60 | 82.91 |
| SGN006271 | Tcell-002 | 60 | 88.64 |
| SGN006271 | Tcell-002 | 80 | 87.50 |
| SGN006271 | Tcell-002 | 80 | 87.12 |
| SGN006271 | Tcell-002 | 80 | 89.02 |
| SGN006272 | Tcell-002 | 20 | 22.21 |
| SGN006272 | Tcell-002 | 20 | 22.28 |
| SGN006272 | Tcell-002 | 20 | 21.25 |
| SGN006272 | Tcell-002 | 40 | 56.69 |
| SGN006272 | Tcell-002 | 40 | 57.41 |
| SGN006272 | Tcell-002 | 40 | 55.48 |
| SGN006272 | Tcell-002 | 60 | 77.66 |
| SGN006272 | Tcell-002 | 60 | 77.89 |
| SGN006272 | Tcell-002 | 60 | 80.23 |
| SGN006272 | Tcell-002 | 80 | 87.83 |
| SGN006272 | Tcell-002 | 80 | 87.82 |
| SGN006272 | Tcell-002 | 80 | 89.80 |
| SGN005637 | Tcell-003 | 20 | 32.39 |
| SGN005637 | Tcell-003 | 20 | 26.68 |
| SGN005637 | Tcell-003 | 20 | 28.88 |
| SGN005637 | Tcell-003 | 40 | 59.69 |
| SGN005637 | Tcell-003 | 40 | 60.34 |
| SGN005637 | Tcell-003 | 40 | 62.44 |
| SGN005637 | Tcell-003 | 60 | 74.69 |
| SGN005637 | Tcell-003 | 60 | 73.71 |
| SGN005637 | Tcell-003 | 60 | 78.70 |
| SGN005637 | Tcell-003 | 80 | 83.57 |
| SGN005637 | Tcell-003 | 80 | 81.71 |
| SGN005637 | Tcell-003 | 80 | 83.90 |
| SGN005641 | Tcell-003 | 20 | 72.01 |
| SGN005641 | Tcell-003 | 20 | 66.83 |
| SGN005641 | Tcell-003 | 20 | 66.89 |
| SGN005641 | Tcell-003 | 40 | 88.52 |
| SGN005641 | Tcell-003 | 40 | 87.66 |
| SGN005641 | Tcell-003 | 40 | 89.84 |
| SGN005641 | Tcell-003 | 60 | 91.18 |
| SGN005641 | Tcell-003 | 60 | 91.01 |
| SGN005641 | Tcell-003 | 60 | 92.53 |
| SGN005641 | Tcell-003 | 80 | 92.31 |
| SGN005641 | Tcell-003 | 80 | 84.35 |
| SGN005641 | Tcell-003 | 80 | 93.85 |
| SGN005707 | Tcell-003 | 20 | 43.28 |
| SGN005707 | Tcell-003 | 20 | 36.26 |
| SGN005707 | Tcell-003 | 20 | 39.04 |
| SGN005707 | Tcell-003 | 40 | 66.15 |
| SGN005707 | Tcell-003 | 40 | 67.63 |
| SGN005707 | Tcell-003 | 40 | 68.67 |
| SGN005707 | Tcell-003 | 60 | 80.34 |
| SGN005707 | Tcell-003 | 60 | 74.86 |
| SGN005707 | Tcell-003 | 60 | 83.36 |
| SGN005707 | Tcell-003 | 80 | 86.88 |
| SGN005707 | Tcell-003 | 80 | 86.91 |
| SGN005707 | Tcell-003 | 80 | 88.80 |
| SGN005649 | Tcell-003 | 20 | 19.90 |
| SGN005649 | Tcell-003 | 20 | 16.19 |
| SGN005649 | Tcell-003 | 20 | 18.43 |
| SGN005649 | Tcell-003 | 40 | 54.10 |
| SGN005649 | Tcell-003 | 40 | 55.56 |
| SGN005649 | Tcell-003 | 40 | 58.53 |
| SGN005649 | Tcell-003 | 60 | 74.46 |
| SGN005649 | Tcell-003 | 60 | 74.26 |
| SGN005649 | Tcell-003 | 60 | 76.82 |
| SGN005649 | Tcell-003 | 80 | 83.06 |
| SGN005649 | Tcell-003 | 80 | 81.10 |
| SGN005649 | Tcell-003 | 80 | 84.09 |
| SGN006271 | Tcell-003 | 20 | 28.38 |
| SGN006271 | Tcell-003 | 20 | 23.48 |
| SGN006271 | Tcell-003 | 20 | 25.17 |
| SGN006271 | Tcell-003 | 40 | 58.49 |
| SGN006271 | Tcell-003 | 40 | 60.51 |
| SGN006271 | Tcell-003 | 40 | 63.40 |
| SGN006271 | Tcell-003 | 60 | 72.90 |
| SGN006271 | Tcell-003 | 60 | 74.69 |
| SGN006271 | Tcell-003 | 60 | 76.95 |
| SGN006271 | Tcell-003 | 80 | 83.77 |
| SGN006271 | Tcell-003 | 80 | 81.17 |
| SGN006271 | Tcell-003 | 80 | 82.94 |
| SGN006272 | Tcell-003 | 20 | 19.62 |
| SGN006272 | Tcell-003 | 20 | 13.06 |
| SGN006272 | Tcell-003 | 20 | 18.26 |
| SGN006272 | Tcell-003 | 40 | 43.26 |
| SGN006272 | Tcell-003 | 40 | 43.92 |
| SGN006272 | Tcell-003 | 40 | 46.10 |
| SGN006272 | Tcell-003 | 60 | 69.28 |
| SGN006272 | Tcell-003 | 60 | 69.59 |
| SGN006272 | Tcell-003 | 60 | 72.86 |
| SGN006272 | Tcell-003 | 80 | 82.23 |
| SGN006272 | Tcell-003 | 80 | 80.18 |
| SGN006272 | Tcell-003 | 80 | 82.36 |
| SGN005637\hat{ } | Tcell-001 | 0 | 0 |
| SGN005637 | Tcell-002 | 0 | 0 |
| SGN005637 | Tcell-003 | 0 | 0 |

\hat{ }Unedited controls are italicized

TABLE 6
Lead FOXP3 guide RNAs that yield the best gene
editing with APG07433.1 RGN from the screens.

| | Guide | spacer | Target |
|---|---|---|---|
| | RNA SEQ | SEQ ID | SEQ ID |
| Guide Name | ID NO: | NO: | NO: |
| SGN005637 | 693 | 155 | 156 |
| SGN005641 | 694 | 163 | 164 |
| SGN005649 | 695 | 179 | 180 |
| SGN005707 | 696 | 189 | 190 |
| SGN006271 | 697 | 197 | 198 |
| SGN006272 | 698 | 193 | 194 |

### Example 2. Establishing Conditions for Gene Editing of a Forkhead Protein P3 (FOXP3) Gene and Screen to Identify APG07433.1 Guide RNA Backbones Effective for Targeting the FOXP3 Gene

[0998] Conditions were established to edit a forkhead protein P3 (FOXP3) gene using an APG07433.1 RGN (SEQ ID NO: 545) and guide RNAs disclosed herein. RGN expression cassettes were produced and introduced into vectors for mammalian expression. The APG07433.1 RGN was codon-optimized for human expression (SEQ ID NO: 548), and operably fused at the 5′ end to an SV40 nuclear localization sequence (NLS; SEQ ID NO: 922) and to 3×FLAG tag (SEQ ID NO: 936), and operably fused at the 3′ end to nucleoplasmin NLS sequences (SEQ ID NO: 923). Two copies of the NLS sequence were used, operably fused in tandem. The construct was then subcloned into a proprietary vector from Trilink Biotechnologies for the purpose of mRNA synthesis (Trilink). The mRNA was synthesized with full substitutions of 5-Methoxyuridine, capped with CleanCap (Trilink), synthesized with an additional 120 polyadenylated tail, and resuspended in 1 mM sodium citrate, pH6.4 (Trilink). Purified mRNA was tested at 2 μg per 1×10⁶ cells per nucleofection for guide screening and optimization purposes.

[0999] The plasmid containing the bacterial codon optimized APG07433.1 RGN coding sequence was synthesized and cloned by TWIST bioscience into a pET-29b(+) vector backbone between the NdeI and XhoI restriction sites. A description of the open reading frame (ORF) in this construct from N to C terminus is as follows: 10× polyhistidine (HIS) tag, tobacco etch virus (TEV) protease site, simian virus 40 (SV40) nuclear localization signal (NLS), APG07433.1 RGN, and nucleoplasmin NLS. Purified protein was used in conjunction with guide RNAs listed below for RNP editing. Various doses of protein and guide were tested to determine optimal conditions.

[1000] Guide RNAs (gRNAs) were synthesized by Integrated DNA technologies. Guides were synthesized with phosphorothioated 2′-O-methyl modifications to the 5′ terminal 3nt and 3′ terminal 3nt of each guide. Spacer and target sequences for each guide are included in the Sequence Listing and sequence descriptions are in Table 10.

[1001] The components described above were introduced into primary human T cells. Three days prior to Amaxa nucleofection, primary human T cells were thawed and activated into a T150 flask containing complete CTS Optimizer T-cell Expansion SFM (Gibco) supplemented with OpTmizer T-Cell Expansion Supplement (2.6% v/v, Gibco), CTS Immune Cell SR (2.5% v/v, Gibco) 1× GlutaMAX Supplement (Gibco) and 1% Penicillin-Streptomycin (Gibco). Base media was also supplemented with recombinant human IL-2 (300 IU/mL, Miltenyi Biotec), human IL-7 (5 ng/mL, Miltenyi Biotec) and human IL-15 (5 ng/mL, Miltenyi Biotec). T cells were activated with anti CD3/CD28 Dynabeads at a ratio of 1:1 bead/cell. Cells were initially seeded at 1×10⁶ cells per ml and grown for 3 days.

[1002] After 3 days of activation, Dynabeads were removed using a magnetic stand and 1×10⁶ T cells were nucleofected using the 4D-Nucleofector™ X Unit (program EO-115 for mRNA and EH-115 for RNP) following the manufacturer's instructions. For mRNA delivery, 2 μg of APG07433.1 RGN in an mRNA format and 4 μg of sgRNA were co-transfected with 1×10⁶ T Cells in 20 μl. Various amounts of protein and guide were tested for RNP delivery.

[1003] After 96 hours of growth, total genomic DNA was harvested using a genomic DNA isolation kit (Machery-Nagel) according to the manufacturer's instructions. The total genomic DNA was then analyzed to determine the rate of editing for each FOXP3 target. First, oligonucleotides were produced to be used for PCR amplification and subsequent analysis of the amplified FOXP3 target site. Oligonucleotide sequences used are listed in Table 4.

[1004] All PCR reactions were performed using 10 μL of 2× Master Mix Phusion High-Fidelity DNA polymerase (Thermo Scientific) in a 20 μL reaction including 0.5 μM of each primer. Large genomic regions encompassing each target gene were first amplified using PCR #1 primers, using a program of: 98° C., 1 min; 30 cycles of [98° C., 10 sec; 62° C., 15 sec; 72° C., 5 min]; 72° C., 5 min; 12° C., forever. One L of this PCR reaction was then further amplified using primers specific for each guide (PCR #2 primers), using a program of: 98° C., 1 min; 35 cycles of [98° C., 10 sec; 67° C., 15 sec; 72° C., 30 sec]; 72° C., 5 min; 12° C., forever. Primers for PCR #2 include Nextera Read 1 and Read 2 Transposase Adapter overhang sequences for Illumina sequencing.

[1005] Table 2 lists FOXP3 guide RNAs used in experiments described in the Examples, along with sequence identifiers for the guide RNAs and their target sequences.

[1006] It was determined that increased 25 nt spacer length improved editing relative to 20 nt spacer length (FIG. 1). Multiple guide RNAs showed >70% editing at FOXP3 over a range of guide RNA:RGN protein ratios (FIG. 2). Consistent editing of FOXP3 could be obtained at higher doses of ribonucleoprotein (RNP) complex of guide RNA and APG07433.1 RGN (FIGS. 3 and 5), and multiple guide RNAs showed >70% editing at FOXP3 in cells from different donors (FIGS. 4 and 5).

[1007] Shortened backbone variants of the native APG07433.1 backbone (native backbone length of 110 nucleotides (nt)) were tested to see which were most effective in editing of the FOXP3 gene. FIGS. 6 and 7 show performance of guide RNAs in FOXP3 editing, either as ratio of editing of guide RNAs with backbone variants and various spacer lengths to guide RNA with native backbone and 25 nt spacer (‘original backbone (135 bp)’)(FIG. 6) or as percent editing of each guide RNA (FIG. 7). Results suggest that the ‘M’ backbone and 94 nt length backbone performed the best, with total guide RNA length at or under 119 nt. The ‘M’ backbone has a deletion of 10 nt in the first stem of stem loop 1 formed by hybridization of the crRNA repeat and anti-repeat, a deletion of 2 nt in stem loop 3 most proximal to the tail of the guide RNA, and a deletion of 4 nt from the tail of the guide RNA. The ‘M’ and 94 nt length backbones yielded high gene editing across a number of FOXP3 targets and was dependent upon spacer length (FIG. 8).

[1008] Truncated guide RNAs (shortened in spacer and/or backbone) were effective at editing multiple FOXP3 target sites across a dose range of RNP and across multiple donors (FIG. 9). Most truncated guide RNAs showed equal or slightly improved editing as compared to the original guide RNA with native backbone and 25 nt spacer (FIG. 10). Cell viability was at or above 80% for most samples, across multiple donors, and across a dose range of RNP (FIG. 11).

### Example 3. No Bona Fide Off-Target Gene Editing was Seen for 5 of the 6 Lead FOXP3 Guide RNAs

[1009] Bioinformatics was used to identify potential off-target sequences. The criteria for potential off-target site selection included no mismatches in the PAM sequence and 5 or less mismatches in the spacer (which includes RNA and DNA bulges). Table 7 shows predicted off-target sites for some FOXP3 guide RNAs and their spacer lengths. Manipulation of spacer length can alter the predicted off-target sites.

TABLE 7
Bioinformatic identification of potential off-target sites.

| Guide RNA | Spacer | | Shortened | Spacer | |
|---|---|---|---|---|---|
| Name | (nt) | # POTS* | Guide | (bp) | # POTS |
| SGN003378 | 25 | 11 | SGN005637 | 23 | 37 |
| SGN003381 | 25 | 13 | SGN005641 | 23 | 15 |
| SGN003384 | 25 | 4 | SGN005649 | 23 | 1 |
| SGN005073 | 25 | 19 | SGN006271 | 23 | 31 |

*POTS - Predicted Off Target Sites

[1010] Amplicon sequencing (Amp-Seq) was used to confirm bona fide off-target sites at 0.1% limit of detection. Table 8 shows gene editing rates for off-target sites for the 6 FOXP3 lead guide RNAs. Changes to spacer length can generate a better guide RNA with no bona fide off-targets (FIG. 13). 5 of the 6 lead FOXP3 guide RNAs had no bona fide off-target gene editing (FIG. 14). Table 9 lists the primers used in generating amplicons for Amp-Seq.

TABLE 8
Gene editing of off-target sequences for lead FOXP3 guide RNAs.

| | Off-Target | Cell | Control | Reads | Reads | Percent |
|---|---|---|---|---|---|---|
| Guide | Number | Line | Type | In | Aligned | Indels |
| SGN005637 | 5637-OT1 | Cell line- | | 183475 | 183213 | 0 |
| | | 001 | | | | |
| | | Cell line- | | 158437 | 158096 | 0 |
| | | 002 | | | | |
| | | Cell line- | | 153949 | 153813 | 0 |
| | | 003 | | | | |
| | | Cell line- | Unedited | 180231 | 180046 | 0 |
| | | 001 | Control | | | |
| | | Cell line- | Unedited | 154910 | 154741 | 0 |
| | | 002 | Control | | | |
| | | Cell line- | Unedited | 172080 | 171887 | 0 |
| | | 003 | Control | | | |
| | 5637-OT2 | Cell line- | | 205026 | 203921 | 0 |
| | | 001 | | | | |
| | | Cell line- | | 175120 | 174731 | 0 |
| | | 002 | | | | |
| | | Cell line- | | 160664 | 160434 | 0 |
| | | 003 | | | | |
| | | Cell line- | Unedited | 168512 | 168093 | 0 |
| | | 001 | Control | | | |
| | | Cell line- | Unedited | 183759 | 183047 | 0 |
| | | 002 | Control | | | |
| | | Cell line- | Unedited | 997524 | 996002 | 0.013730398 |
| | | 003 | Control | | | |
| | 5637-OT4 | Cell line- | | 169094 | 168540 | 3.807021882 |
| | | 001 | | | | |
| | | Cell line- | | 214782 | 214213 | 5.856096259 |
| | | 002 | | | | |
| | | Cell line- | | 215959 | 215337 | 4.201692922 |
| | | 003 | | | | |
| | | Cell line- | Unedited | 171152 | 170725 | 3.513581166 |
| | | 001 | Control | | | |
| | | Cell line- | Unedited | 181842 | 181398 | 5.486579301 |
| | | 002 | Control | | | |
| | | Cell line- | Unedited | 276022 | 275290 | 4.906624551 |
| | | 003 | Control | | | |
| | 5637-OT4 | Cell line- | | 150532 | 150146 | 0 |
| | | 001 | | | | |
| | | Cell line- | | 113490 | 113210 | 0 |
| | | 002 | | | | |
| | | Cell line- | | 125827 | 125563 | 0 |
| | | 003 | | | | |
| | | Cell line- | Unedited | 118058 | 117782 | 0 |
| | | 001 | Control | | | |
| | | Cell line- | Unedited | 113270 | 113018 | 0 |
| | | 002 | Control | | | |
| | | Cell line- | Unedited | 125012 | 124731 | 0 |
| | | 003 | Control | | | |
| | 5637-OT6 | Cell line- | | 129523 | 129204 | 0 |
| | | 001 | | | | |
| | | Cell line- | | 97784 | 97569 | 0 |
| | | 002 | | | | |
| | | Cell line- | | 115052 | 114805 | 0 |
| | | 003 | | | | |
| | | Cell line- | Unedited | 119926 | 119607 | 0 |
| | | 001 | Control | | | |
| | | Cell line- | Unedited | 124422 | 124164 | 0 |
| | | 002 | Control | | | |
| | | Cell line- | Unedited | 128489 | 128207 | 0 |
| | | 003 | Control | | | |
| | 5637-OT7 | Cell line- | | 139588 | 137227 | 5.409052530 |
| | | 001 | | | | |
| | | Cell line- | | 120943 | 119438 | 3.134734026 |
| | | 002 | | | | |
| | | Cell line- | | 102928 | 101164 | 5.202627008 |
| | | 003 | | | | |
| | | Cell line- | Unedited | 109478 | 108014 | 2.978107197 |
| | | 001 | Control | | | |
| | | Cell line- | Unedited | 104773 | 103176 | 3.457196142 |
| | | 002 | Control | | | |
| | | Cell line- | Unedited | 113186 | 111336 | 4.535825777 |
| | | 003 | Control | | | |
| | 5637-OT8 | Cell line- | | 175175 | 170318 | 0.186097097 |
| | | 001 | | | | |
| | | Cell line- | | 178505 | 175075 | 0.170383596 |
| | | 002 | | | | |
| | | Cell line- | | 191830 | 185853 | 0.138262302 |
| | | 003 | | | | |
| | | Cell line- | Unedited | 186726 | 180119 | 0.122809611 |
| | | 001 | Control | | | |
| | | Cell line- | Unedited | 179663 | 171404 | 0.127925397 |
| | | 002 | Control | | | |
| | | Cell line- | Unedited | 179494 | 170466 | 0.149519915 |
| | | 003 | Control | | | |
| | 5637-OT9 | Cell line- | | 134410 | 134242 | 0 |
| | | 001 | | | | |
| | | Cell line- | | 171148 | 171001 | 0 |
| | | 002 | | | | |
| | | Cell line- | | 205390 | 205092 | 0 |
| | | 003 | | | | |
| | | Cell line- | Unedited | 187611 | 187383 | 0 |
| | | 001 | Control | | | |
| | | Cell line- | Unedited | 149326 | 148948 | 0 |
| | | 002 | Control | | | |
| | | Cell line- | Unedited | 168484 | 168177 | 0 |
| | | 003 | Control | | | |
| | 5637-OT10 | Cell line- | | 182926 | 182461 | 0 |
| | | 001 | | | | |
| | | Cell line- | | 192336 | 192044 | 0 |
| | | 002 | | | | |
| | | Cell line- | | 170432 | 170212 | 0 |
| | | 003 | | | | |
| | | Cell line- | Unedited | 187470 | 187156 | 0 |
| | | 001 | Control | | | |
| | | Cell line- | Unedited | 177197 | 176960 | 0 |
| | | 002 | Control | | | |
| | | Cell line- | Unedited | 172210 | 171416 | 0 |
| | | 003 | Control | | | |
| | 5637-OT11 | Cell line- | | 177320 | 177171 | 0 |
| | | 001 | | | | |
| | | Cell line- | | 141652 | 141555 | 0 |
| | | 002 | | | | |
| | | Cell line- | | 99883 | 99811 | 0 |
| | | 003 | | | | |
| | | Cell line- | Unedited | 166019 | 165887 | 0 |
| | | 001 | Control | | | |
| | | Cell line- | Unedited | 145248 | 145137 | 0 |
| | | 002 | Control | | | |
| | | Cell line- | Unedited | 171129 | 170963 | 0 |
| | | 003 | Control | | | |
| | 5637-OT12 | Cell line- | | 249585 | 248446 | 0 |
| | | 001 | | | | |
| | | Cell line- | | 254502 | 253493 | 0 |
| | | 002 | | | | |
| | | Cell line- | | 276754 | 275588 | 0 |
| | | 003 | | | | |
| | | Cell line- | Unedited | 604437 | 601835 | 0 |
| | | 001 | Control | | | |
| | | Cell line- | Unedited | 355925 | 354396 | 0 |
| | | 002 | Control | | | |
| | | Cell line- | Unedited | 355563 | 354080 | 0 |
| | | 003 | Control | | | |
| | 5637-OT13 | Cell line- | | 138311 | 137901 | 0 |
| | | 001 | | | | |
| | | Cell line- | | 140195 | 139821 | 0 |
| | | 002 | | | | |
| | | Cell line- | | 145980 | 145484 | 0 |
| | | 003 | | | | |
| | | Cell line- | Unedited | 131439 | 130977 | 0 |
| | | 001 | Control | | | |
| | | Cell line- | Unedited | 145859 | 145385 | 0 |
| | | 002 | Control | | | |
| | | Cell line- | Unedited | 153769 | 153084 | 0 |
| | | 003 | Control | | | |
| | 5637-OT14 | Cell line- | | 144823 | 144608 | 0 |
| | | 001 | | | | |
| | | Cell line- | | 144755 | 144543 | 0 |
| | | 002 | | | | |
| | | Cell line- | | 141346 | 141142 | 0 |
| | | 003 | | | | |
| | | Cell line- | Unedited | 148163 | 147937 | 0 |
| | | 001 | Control | | | |
| | | Cell line- | Unedited | 142585 | 142413 | 0 |
| | | 002 | Control | | | |
| | | Cell line- | Unedited | 180292 | 180025 | 0 |
| | | 003 | Control | | | |
| | 5637-OT15 | Cell line- | | 116580 | 116414 | 0 |
| | | 001 | | | | |
| | | Cell line- | | 118493 | 118285 | 0 |
| | | 002 | | | | |
| | | Cell line- | | 123798 | 123560 | 0 |
| | | 003 | | | | |
| | | Cell line- | Unedited | 118327 | 118102 | 0 |
| | | 001 | Control | | | |
| | | Cell line- | Unedited | 81833 | 81687 | 0 |
| | | 002 | Control | | | |
| | | Cell line- | Unedited | 144217 | 143934 | 0 |
| | | 003 | Control | | | |
| | 5637-OT16 | Cell line- | | 216908 | 216471 | 0 |
| | | 001 | | | | |
| | | Cell line- | | 180970 | 180693 | 0 |
| | | 002 | | | | |
| | | Cell line- | | 192276 | 191983 | 0 |
| | | 003 | | | | |
| | | Cell line- | Unedited | 199088 | 198789 | 0 |
| | | 001 | Control | | | |
| | | Cell line- | Unedited | 220733 | 220386 | 0 |
| | | 002 | Control | | | |
| | | Cell line- | Unedited | 183680 | 183351 | 0 |
| | | 003 | Control | | | |
| | 5637-OT17 | Cell line- | | 174323 | 174016 | 0 |
| | | 001 | | | | |
| | | Cell line- | | 152249 | 152010 | 0 |
| | | 002 | | | | |
| | | Cell line- | | 140102 | 139901 | 0 |
| | | 003 | | | | |
| | | Cell line- | Unedited | 132135 | 131902 | 0 |
| | | 001 | Control | | | |
| | | Cell line- | Unedited | 126047 | 125846 | 0 |
| | | 002 | Control | | | |
| | | Cell line- | Unedited | 119166 | 118965 | 0 |
| | | 003 | Control | | | |
| | 5637-OT18 | Cell line- | | 225970 | 224752 | 0 |
| | | 001 | | | | |
| | | Cell line- | | 274401 | 272327 | 0 |
| | | 002 | | | | |
| | | Cell line- | | 158309 | 157106 | 0 |
| | | 003 | | | | |
| | | Cell line- | Unedited | 175811 | 174931 | 0 |
| | | 001 | Control | | | |
| | | Cell line- | Unedited | 173683 | 172724 | 0 |
| | | 002 | Control | | | |
| | | Cell line- | Unedited | 202250 | 200781 | 0 |
| | | 003 | Control | | | |
| | 5637-OT19 | Cell line- | | 172668 | 172225 | 0 |
| | | 001 | | | | |
| | | Cell line- | | 75022 | 74763 | 0 |
| | | 002 | | | | |
| | | Cell line- | | 129749 | 129475 | 0 |
| | | 003 | | | | |
| | | Cell line- | Unedited | 112676 | 112390 | 0 |
| | | 001 | Control | | | |
| | | Cell line- | Unedited | 115803 | 115536 | 0 |
| | | 002 | Control | | | |
| | | Cell line- | Unedited | 133961 | 133657 | 0 |
| | | 003 | Control | | | |
| | 5637-OT20 | Cell line- | | 153340 | 152497 | 0 |
| | | 001 | | | | |
| | | Cell line- | | 95508 | 95167 | 0 |
| | | 002 | | | | |
| | | Cell line- | | 127598 | 126372 | 0 |
| | | 003 | | | | |
| | | Cell line- | Unedited | 142029 | 141535 | 0 |
| | | 001 | Control | | | |
| | | Cell line- | Unedited | 119733 | 119164 | 0 |
| | | 002 | Control | | | |
| | | Cell line- | Unedited | 123858 | 123134 | 0 |
| | | 003 | Control | | | |
| | 5637-OT21 | Cell line- | | 181618 | 171699 | 0 |
| | | 001 | | | | |
| | | Cell line- | | 131985 | 127256 | 0 |
| | | 002 | | | | |
| | | Cell line- | | 184130 | 178006 | 0 |
| | | 003 | | | | |
| | | Cell line- | Unedited | 186565 | 181107 | 0 |
| | | 001 | Control | | | |
| | | Cell line- | Unedited | 179623 | 172141 | 0 |
| | | 002 | Control | | | |
| | | Cell line- | Unedited | 230916 | 221538 | 0 |
| | | 003 | Control | | | |
| | 5637-OT22 | Cell line- | | 117802 | 115698 | 0 |
| | | 001 | | | | |
| | | Cell line- | | 137524 | 136167 | 0 |
| | | 002 | | | | |
| | | Cell line- | | 123924 | 121936 | 0 |
| | | 003 | | | | |
| | | Cell line- | Unedited | 124209 | 121237 | 0 |
| | | 001 | Control | | | |
| | | Cell line- | Unedited | 130509 | 129299 | 0 |
| | | 002 | Control | | | |
| | | Cell line- | Unedited | 138778 | 136805 | 0 |
| | | 003 | Control | | | |
| | 5637-OT23 | Cell line- | | 160949 | 142952 | 0 |
| | | 001 | | | | |
| | | Cell line- | | 139531 | 125400 | 0 |
| | | 002 | | | | |
| | | Cell line- | | 174062 | 159869 | 0 |
| | | 003 | | | | |
| | | Cell line- | Unedited | 137181 | 126627 | 0 |
| | | 001 | Control | | | |
| | | Cell line- | Unedited | 137392 | 125443 | 0 |
| | | 002 | Control | | | |
| | | Cell line- | Unedited | 129200 | 118287 | 0 |
| | | 003 | Control | | | |
| | 5637-OT24 | Cell line- | | 146038 | 145533 | 1.440182216 |
| | | 001 | | | | |
| | | Cell line- | | 160026 | 159599 | 1.841903794 |
| | | 002 | | | | |
| | | Cell line- | | 135018 | 134623 | 1.693028256 |
| | | 003 | | | | |
| | | Cell line- | Unedited | 153382 | 152932 | 1.223008993 |
| | | 001 | Control | | | |
| | | Cell line- | Unedited | 151764 | 151130 | 1.934019804 |
| | | 002 | Control | | | |
| | | Cell line- | Unedited | 162262 | 161413 | 2.416418829 |
| | | 003 | Control | | | |
| | 5637-OT25 | Cell line- | | 167755 | 167537 | 0 |
| | | 001 | | | | |
| | | Cell line- | | 179831 | 179623 | 0 |
| | | 002 | | | | |
| | | Cell line- | | 198835 | 198577 | 0 |
| | | 003 | | | | |
| | | Cell line- | Unedited | 213451 | 213200 | 0 |
| | | 001 | Control | | | |
| | | Cell line- | Unedited | 192533 | 192282 | 0 |
| | | 002 | Control | | | |
| | | Cell line- | Unedited | 223867 | 223517 | 0 |
| | | 003 | Control | | | |
| | 5637-OT26 | Cell line- | | 188937 | 188686 | 0.184912638 |
| | | 001 | | | | |
| | | Cell line- | | 177710 | 177524 | 0.288859977 |
| | | 002 | | | | |
| | | Cell line- | | 189293 | 189055 | 0.223935231 |
| | | 003 | | | | |
| | | Cell line- | Unedited | 186087 | 185889 | 0.195985044 |
| | | 001 | Control | | | |
| | | Cell line- | Unedited | 192082 | 191858 | 0.216437586 |
| | | 002 | Control | | | |
| | | Cell line- | Unedited | 213778 | 213523 | 0.267675659 |
| | | 003 | Control | | | |
| | 5637-OT27 | Cell line- | | 201455 | 200740 | 0.161394775 |
| | | 001 | | | | |
| | | Cell line- | | 188673 | 187926 | 0.157962500 |
| | | 002 | | | | |
| | | Cell line- | | 230750 | 229935 | 0.164832737 |
| | | 003 | | | | |
| | | Cell line- | Unedited | 212295 | 211477 | 0.151533373 |
| | | 001 | Control | | | |
| | | Cell line- | Unedited | 227789 | 226891 | 0.159583290 |
| | | 002 | Control | | | |
| | | Cell line- | Unedited | 262650 | 261836 | 0.146569574 |
| | | 003 | Control | | | |
| | 5637-OT28 | Cell line- | | 114432 | 113204 | 0 |
| | | 001 | | | | |
| | | Cell line- | | 118251 | 117543 | 0 |
| | | 002 | | | | |
| | | Cell line- | | 118255 | 117560 | 0 |
| | | 003 | | | | |
| | | Cell line- | Unedited | 113443 | 111274 | 0 |
| | | 001 | Control | | | |
| | | Cell line- | Unedited | 106477 | 106098 | 0 |
| | | 002 | Control | | | |
| | | Cell line- | Unedited | 143718 | 143096 | 0 |
| | | 003 | Control | | | |
| | 5637-OT30 | Cell line- | | 160587 | 152576 | 0.674088738 |
| | | 001 | | | | |
| | | Cell line- | | 121390 | 117492 | 0.379001840 |
| | | 002 | | | | |
| | | Cell line- | | 139404 | 126882 | 0.761009798 |
| | | 003 | | | | |
| | | Cell line- | Unedited | 141971 | 134386 | 0.724111794 |
| | | 001 | Control | | | |
| | | Cell line- | Unedited | 123163 | 115676 | 0.614580053 |
| | | 002 | Control | | | |
| | | Cell line- | Unedited | 133546 | 122424 | 0.627498331 |
| | | 003 | Control | | | |
| | 5637-OT31 | Cell line- | | 121550 | 79698 | 0 |
| | | 001 | | | | |
| | | Cell line- | | 102402 | 89013 | 0 |
| | | 002 | | | | |
| | | Cell line- | | 171221 | 107099 | 0 |
| | | 003 | | | | |
| | | Cell line- | Unedited | 116431 | 75090 | 0 |
| | | 001 | Control | | | |
| | | Cell line- | Unedited | 93988 | 80603 | 0 |
| | | 002 | Control | | | |
| | | Cell line- | Unedited | 105722 | 71745 | 0 |
| | | 003 | Control | | | |
| | 5637-OT32 | Cell line- | | 264592 | 260696 | 0 |
| | | 001 | | | | |
| | | Cell line- | | 188657 | 187004 | 0 |
| | | 002 | | | | |
| | | Cell line- | | 240995 | 238179 | 0 |
| | | 003 | | | | |
| | | Cell line- | Unedited | 220874 | 219104 | 0 |
| | | 001 | Control | | | |
| | | Cell line- | Unedited | 203165 | 202384 | 0 |
| | | 002 | Control | | | |
| | | Cell line- | Unedited | 248971 | 247369 | 0 |
| | | 003 | Control | | | |
| | 5637-OT33 | Cell line- | | 225237 | 224556 | 0 |
| | | 001 | | | | |
| | | Cell line- | | 187102 | 186684 | 0 |
| | | 002 | | | | |
| | | Cell line- | | 178561 | 178113 | 0 |
| | | 003 | | | | |
| | | Cell line- | Unedited | 184826 | 184394 | 0 |
| | | 001 | Control | | | |
| | | Cell line- | Unedited | 168306 | 168050 | 0 |
| | | 002 | Control | | | |
| | | Cell line- | Unedited | 255116 | 254649 | 0 |
| | | 003 | Control | | | |
| | 5637-OT34 | Cell line- | | 171527 | 171022 | 0 |
| | | 001 | | | | |
| | | Cell line- | | 156297 | 155944 | 0 |
| | | 002 | | | | |
| | | Cell line- | | 159002 | 158643 | 0 |
| | | 003 | | | | |
| | | Cell line- | Unedited | 162722 | 162342 | 0 |
| | | 001 | Control | | | |
| | | Cell line- | Unedited | 144254 | 143889 | 0 |
| | | 002 | Control | | | |
| | | Cell line- | Unedited | 147099 | 146895 | 0 |
| | | 003 | Control | | | |
| | 5637-OT35 | Cell line- | | 131706 | 117991 | 0 |
| | | 001 | | | | |
| | | Cell line- | | 81445 | 74829 | 0 |
| | | 002 | | | | |
| | | Cell line- | | 134157 | 126492 | 0 |
| | | 003 | | | | |
| | | Cell line- | Unedited | 83125 | 81203 | 0 |
| | | 001 | Control | | | |
| | | Cell line- | Unedited | 74808 | 73320 | 0 |
| | | 002 | Control | | | |
| | | Cell line- | Unedited | 90238 | 87975 | 0 |
| | | 003 | Control | | | |
| | 5637-OT36 | Cell line- | | 137315 | 137142 | 0 |
| | | 001 | | | | |
| | | Cell line- | | 116658 | 116494 | 0 |
| | | 002 | | | | |
| | | Cell line- | | 131894 | 131716 | 0 |
| | | 003 | | | | |
| | | Cell line- | Unedited | 114734 | 114569 | 0 |
| | | 001 | Control | | | |
| | | Cell line- | Unedited | 114146 | 113929 | 0 |
| | | 002 | Control | | | |
| | | Cell line- | Unedited | 112432 | 112269 | 0 |
| | | 003 | Control | | | |
| | 5637-OT37 | Cell line- | | 109283 | 109133 | 0 |
| | | 001 | | | | |
| | | Cell line- | | 99732 | 99578 | 0 |
| | | 002 | | | | |
| | | Cell line- | | 105017 | 104902 | 0 |
| | | 003 | | | | |
| | | Cell line- | Unedited | 99862 | 99707 | 0 |
| | | 001 | Control | | | |
| | | Cell line- | Unedited | 94766 | 94586 | 0 |
| | | 002 | Control | | | |
| | | Cell line- | Unedited | 83899 | 83785 | 0 |
| | | 003 | Control | | | |
| SGN005641 | 5641-OT1 | Cell line- | | 161814 | 161393 | 0 |
| | | 001 | | | | |
| | | Cell line- | | 170999 | 170570 | 0 |
| | | 002 | | | | |
| | | Cell line- | | 170987 | 170096 | 0 |
| | | 003 | | | | |
| | | Cell line- | Unedited | 178384 | 177503 | 0 |
| | | 001 | Control | | | |
| | | Cell line- | Unedited | 167232 | 166338 | 0 |
| | | 002 | Control | | | |
| | | Cell line- | Unedited | 237295 | 235822 | 0 |
| | | 003 | Control | | | |
| | 5641-OT2 | Cell line- | | 220258 | 219817 | 0 |
| | | 001 | | | | |
| | | Cell line- | | 217857 | 217454 | 0 |
| | | 002 | | | | |
| | | Cell line- | | 207456 | 207034 | 0 |
| | | 003 | | | | |
| | | Cell line- | Unedited | 199297 | 198835 | 0 |
| | | 001 | Control | | | |
| | | Cell line- | Unedited | 227035 | 226547 | 0 |
| | | 002 | Control | | | |
| | | Cell line- | Unedited | 228922 | 228505 | 0 |
| | | 003 | Control | | | |
| | 5641-OT3 | Cell line- | | 209463 | 209128 | 0 |
| | | 001 | | | | |
| | | Cell line- | | 221280 | 220968 | 0 |
| | | 002 | | | | |
| | | Cell line- | | 232003 | 231561 | 0 |
| | | 003 | | | | |
| | | Cell line- | Unedited | 221347 | 220880 | 0 |
| | | 001 | Control | | | |
| | | Cell line- | Unedited | 255923 | 255453 | 0 |
| | | 002 | Control | | | |
| | | Cell line- | Unedited | 362498 | 362060 | 0 |
| | | 003 | Control | | | |
| | 5641-OT4 | Cell line- | | 104728 | 103119 | 0.694327513 |
| | | 001 | | | | |
| | | Cell line- | | 108748 | 107709 | 0.586902313 |
| | | 002 | | | | |
| | | Cell line- | | 107756 | 105156 | 0.791134638 |
| | | 003 | | | | |
| | | Cell line- | Unedited | 107392 | 105243 | 0.810624521 |
| | | 001 | Control | | | |
| | | Cell line- | Unedited | 112005 | 110179 | 1.051938294 |
| | | 002 | Control | | | |
| | | Cell line- | Unedited | 102562 | 98685 | 1.684915599 |
| | | 003 | Control | | | |
| | 5641-OT5 | Cell line- | | 104658 | 104396 | 0 |
| | | 001 | | | | |
| | | Cell line- | | 93256 | 93121 | 0 |
| | | 002 | | | | |
| | | Cell line- | | 112485 | 112330 | 0 |
| | | 003 | | | | |
| | | Cell line- | Unedited | 125010 | 124813 | 0 |
| | | 001 | Control | | | |
| | | Cell line- | Unedited | 119046 | 118866 | 0 |
| | | 002 | Control | | | |
| | | Cell line- | Unedited | 130707 | 130470 | 0 |
| | | 003 | Control | | | |
| | 5641-OT6 | Cell line- | | 108372 | 108112 | 0 |
| | | 001 | | | | |
| | | Cell line- | | 100107 | 99952 | 0 |
| | | 002 | | | | |
| | | Cell line- | | 111609 | 111467 | 0 |
| | | 003 | | | | |
| | | Cell line- | Unedited | 110970 | 110848 | 0 |
| | | 001 | Control | | | |
| | | Cell line- | Unedited | 120451 | 120302 | 0 |
| | | 002 | Control | | | |
| | | Cell line- | Unedited | 115563 | 115399 | 0 |
| | | 003 | Control | | | |
| | 5641-OT7 | Cell line- | | 106744 | 106549 | 0 |
| | | 001 | | | | |
| | | Cell line- | | 106641 | 106525 | 0 |
| | | 002 | | | | |
| | | Cell line- | | 113067 | 112948 | 0 |
| | | 003 | | | | |
| | | Cell line- | Unedited | 111962 | 111776 | 0 |
| | | 001 | Control | | | |
| | | Cell line- | Unedited | 108443 | 108285 | 0 |
| | | 002 | Control | | | |
| | | Cell line- | Unedited | 116442 | 116032 | 0 |
| | | 003 | Control | | | |
| | 5641-OT8 | Cell line- | | 160201 | 159217 | 0 |
| | | 001 | | | | |
| | | Cell line- | | 132503 | 132094 | 0 |
| | | 002 | | | | |
| | | Cell line- | | 126263 | 125785 | 0 |
| | | 003 | | | | |
| | | Cell line- | Unedited | 123871 | 123624 | 0 |
| | | 001 | Control | | | |
| | | Cell line- | Unedited | 150319 | 150105 | 0 |
| | | 002 | Control | | | |
| | | Cell line- | Unedited | 118333 | 118076 | 0 |
| | | 003 | Control | | | |
| | 5641-OT9 | Cell line- | | 86077 | 85971 | 0 |
| | | 001 | | | | |
| | | Cell line- | | 87583 | 87444 | 0 |
| | | 002 | | | | |
| | | Cell line- | | 88293 | 88197 | 0 |
| | | 003 | | | | |
| | | Cell line- | Unedited | 88761 | 88685 | 0 |
| | | 001 | Control | | | |
| | | Cell line- | Unedited | 85529 | 85432 | 0 |
| | | 002 | Control | | | |
| | | Cell line- | Unedited | 76426 | 76368 | 0 |
| | | 003 | Control | | | |
| | 5641-OT10 | Cell line- | | 113386 | 113278 | 0 |
| | | 001 | | | | |
| | | Cell line- | | 101691 | 101580 | 0 |
| | | 002 | | | | |
| | | Cell line- | | 92347 | 92273 | 0 |
| | | 003 | | | | |
| | | Cell line- | Unedited | 80647 | 80562 | 0 |
| | | 001 | Control | | | |
| | | Cell line- | Unedited | 89253 | 89152 | 0 |
| | | 002 | Control | | | |
| | | Cell line- | Unedited | 88972 | 88892 | 0 |
| | | 003 | Control | | | |
| | 5641-OT11 | Cell line- | | 92824 | 92595 | 0 |
| | | 001 | | | | |
| | | Cell line- | | 73260 | 73127 | 0 |
| | | 002 | | | | |
| | | Cell line- | | 105510 | 105309 | 0 |
| | | 003 | | | | |
| | | Cell line- | Unedited | 104065 | 103865 | 0 |
| | | 001 | Control | | | |
| | | Cell line- | Unedited | 91648 | 91491 | 0 |
| | | 002 | Control | | | |
| | | Cell line- | Unedited | 91447 | 91293 | 0 |
| | | 003 | Control | | | |
| | 5641-OT12 | Cell line- | | 97585 | 97247 | 0 |
| | | 001 | | | | |
| | | Cell line- | | 97426 | 97211 | 0 |
| | | 002 | | | | |
| | | Cell line- | | 78779 | 78423 | 0 |
| | | 003 | | | | |
| | | Cell line- | Unedited | 64718 | 64486 | 0 |
| | | 001 | Control | | | |
| | | Cell line- | Unedited | 59815 | 59550 | 0 |
| | | 002 | Control | | | |
| | | Cell line- | Unedited | 61452 | 61247 | 0 |
| | | 003 | Control | | | |
| | 5641-OT13 | Cell line- | | 103291 | 103096 | 0 |
| | | 001 | | | | |
| | | Cell line- | | 86305 | 86216 | 0 |
| | | 002 | | | | |
| | | Cell line- | | 100756 | 100595 | 0 |
| | | 003 | | | | |
| | | Cell line- | Unedited | 103997 | 103856 | 0 |
| | | 001 | Control | | | |
| | | Cell line- | Unedited | 95807 | 95689 | 0 |
| | | 002 | Control | | | |
| | | Cell line- | Unedited | 89112 | 89004 | 0 |
| | | 003 | Control | | | |
| | 5641-OT14 | Cell line- | | 139205 | 135459 | 0 |
| | | 001 | | | | |
| | | Cell line- | | 151153 | 149870 | 0 |
| | | 002 | | | | |
| | | Cell line- | | 160920 | 158217 | 0 |
| | | 003 | | | | |
| | | Cell line- | Unedited | 64735 | 63470 | 0 |
| | | 001 | Control | | | |
| | | Cell line- | Unedited | 115417 | 112882 | 0 |
| | | 002 | Control | | | |
| | | Cell line- | Unedited | 95081 | 91021 | 0 |
| | | 003 | Control | | | |
| | 5641-OT15 | Cell line- | | 108578 | 108423 | 0.157012281 |
| | | 001 | | | | |
| | | Cell line- | | 97611 | 97471 | 0.170412627 |
| | | 002 | | | | |
| | | Cell line- | | 96956 | 96809 | 0.151697442 |
| | | 003 | | | | |
| | | Cell line- | Unedited | 95638 | 95497 | 0.145173254 |
| | | 001 | Control | | | |
| | | Cell line- | Unedited | 101008 | 100846 | 0.164551247 |
| | | 002 | Control | | | |
| | | Cell line- | Unedited | 91599 | 91488 | 0.167022465 |
| | | 003 | Control | | | |
| SGN005649 | 5649-OT1 | Cell line- | | 76048 | 75857 | 0 |
| | | 001 | | | | |
| | | Cell line- | | 70780 | 70601 | 0 |
| | | 002 | | | | |
| | | Cell line- | | 126558 | 126185 | 0 |
| | | 003 | | | | |
| | | Cell line- | Unedited | 122480 | 121976 | 0 |
| | | 001 | Control | | | |
| | | Cell line- | Unedited | 70885 | 70713 | 0 |
| | | 002 | Control | | | |
| | | Cell line- | Unedited | 72553 | 72379 | 0 |
| | | 003 | Control | | | |
| SGN005707 | 5707-OT1 | Cell line- | | 166967 | 166438 | 0 |
| | | 001 | | | | |
| | | Cell line- | | 134812 | 134372 | 0 |
| | | 002 | | | | |
| | | Cell line- | | 172446 | 171903 | 0 |
| | | 003 | | | | |
| | | Cell line- | Unedited | 177752 | 177153 | 0 |
| | | 001 | Control | | | |
| | | Cell line- | Unedited | 177980 | 177366 | 0 |
| | | 002 | Control | | | |
| | | Cell line- | Unedited | 183603 | 182862 | 0 |
| | | 003 | Control | | | |
| | 5707-OT2 | Cell line- | | 173825 | 173493 | 0 |
| | | 001 | | | | |
| | | Cell line- | | 141583 | 141402 | 0 |
| | | 002 | | | | |
| | | Cell line- | | 193808 | 193520 | 0 |
| | | 003 | | | | |
| | | Cell line- | Unedited | 178156 | 177903 | 0 |
| | | 001 | Control | | | |
| | | Cell line- | Unedited | 156895 | 156606 | 0 |
| | | 002 | Control | | | |
| | | Cell line- | Unedited | 213569 | 213252 | 0 |
| | | 003 | Control | | | |
| | 5707-OT3 | Cell line- | | 297933 | 296808 | 0 |
| | | 001 | | | | |
| | | Cell line- | | 143932 | 143346 | 0 |
| | | 002 | | | | |
| | | Cell line- | | 158384 | 157864 | 0 |
| | | 003 | | | | |
| | | Cell line- | Unedited | 148416 | 147807 | 0 |
| | | 001 | Control | | | |
| | | Cell line- | Unedited | 211383 | 210595 | 0 |
| | | 002 | Control | | | |
| | | Cell line- | Unedited | 169108 | 164614 | 0 |
| | | 003 | Control | | | |
| | 5707-OT4 | Cell line- | | 190978 | 190587 | 0 |
| | | 001 | | | | |
| | | Cell line- | | 166723 | 166385 | 0 |
| | | 002 | | | | |
| | | Cell line- | | 170839 | 170417 | 0 |
| | | 003 | | | | |
| | | Cell line- | Unedited | 157686 | 156844 | 0 |
| | | 001 | Control | | | |
| | | Cell line- | Unedited | 165612 | 164849 | 0 |
| | | 002 | Control | | | |
| | | Cell line- | Unedited | 166668 | 164906 | 0 |
| | | 003 | Control | | | |
| | 5707-OT5 | Cell line- | | 133048 | 132815 | 0 |
| | | 001 | | | | |
| | | Cell line- | | 106862 | 106724 | 0 |
| | | 002 | | | | |
| | | Cell line- | | 114604 | 114428 | 0 |
| | | 003 | | | | |
| | | Cell line- | Unedited | 110364 | 110079 | 0 |
| | | 001 | Control | | | |
| | | Cell line- | Unedited | 83804 | 83585 | 0 |
| | | 002 | Control | | | |
| | | Cell line- | Unedited | 75486 | 75257 | 0 |
| | | 003 | Control | | | |
| | 5707-OT6 | Cell line- | | 159466 | 159232 | 0 |
| | | 001 | | | | |
| | | Cell line- | | 136713 | 136550 | 0 |
| | | 002 | | | | |
| | | Cell line- | | 167055 | 166883 | 0 |
| | | 003 | | | | |
| | | Cell line- | Unedited | 174724 | 174509 | 0 |
| | | 001 | Control | | | |
| | | Cell line- | Unedited | 155684 | 155500 | 0 |
| | | 002 | Control | | | |
| | | Cell line- | Unedited | 150805 | 150622 | 0 |
| | | 003 | Control | | | |
| SGN006271 | 6271-OT1 | Cell line- | | 104474 | 104319 | 0 |
| | | 001 | | | | |
| | | Cell line- | | 101355 | 101261 | 0 |
| | | 002 | | | | |
| | | Cell line- | | 118131 | 117996 | 0 |
| | | 003 | | | | |
| | | Cell line- | Unedited | 129690 | 129537 | 0 |
| | | 001 | Control | | | |
| | | Cell line- | Unedited | 112070 | 111949 | 0 |
| | | 002 | Control | | | |
| | | Cell line- | Unedited | 120508 | 120384 | 0 |
| | | 003 | Control | | | |
| | 6271-OT2 | Cell line- | | 95376 | 95179 | 0 |
| | | 001 | | | | |
| | | Cell line- | | 82366 | 82262 | 0 |
| | | 002 | | | | |
| | | Cell line- | | 87630 | 87508 | 0 |
| | | 003 | | | | |
| | | Cell line- | Unedited | 89539 | 89431 | 0 |
| | | 001 | Control | | | |
| | | Cell line- | Unedited | 74460 | 74352 | 0 |
| | | 002 | Control | | | |
| | | Cell line- | Unedited | 94074 | 93667 | 0 |
| | | 003 | Control | | | |
| | 6271-OT3 | Cell line- | | 92660 | 92486 | 0 |
| | | 001 | | | | |
| | | Cell line- | | 98365 | 98222 | 0 |
| | | 002 | | | | |
| | | Cell line- | | 105675 | 105534 | 0 |
| | | 003 | | | | |
| | | Cell line- | Unedited | 113144 | 112976 | 0 |
| | | 001 | Control | | | |
| | | Cell line- | Unedited | 103875 | 103738 | 0 |
| | | 002 | Control | | | |
| | | Cell line- | Unedited | 123977 | 123803 | 0 |
| | | 003 | Control | | | |
| | 6271-OT4 | Cell line- | | 73006 | 72901 | 0 |
| | | 001 | | | | |
| | | Cell line- | | 116835 | 116762 | 0 |
| | | 002 | | | | |
| | | Cell line- | | 84427 | 84322 | 0 |
| | | 003 | | | | |
| | | Cell line- | Unedited | 115250 | 115150 | 0 |
| | | 001 | Control | | | |
| | | Cell line- | Unedited | 113690 | 113575 | 0 |
| | | 002 | Control | | | |
| | | Cell line- | Unedited | 71217 | 71100 | 0 |
| | | 003 | Control | | | |
| | 6271-OT5 | Cell line- | | 72047 | 71959 | 0 |
| | | 001 | | | | |
| | | Cell line- | | 77719 | 77550 | 0 |
| | | 002 | | | | |
| | | Cell line- | | 82175 | 82062 | 0 |
| | | 003 | | | | |
| | | Cell line- | Unedited | 76732 | 76618 | 0 |
| | | 001 | Control | | | |
| | | Cell line- | Unedited | 82590 | 82470 | 0 |
| | | 002 | Control | | | |
| | | Cell line- | Unedited | 96132 | 95905 | 0 |
| | | 003 | Control | | | |
| | 6271-OT6 | Cell line- | | 101919 | 101790 | 0 |
| | | 001 | | | | |
| | | Cell line- | | 101910 | 101802 | 0 |
| | | 002 | | | | |
| | | Cell line- | | 94901 | 94816 | 0 |
| | | 003 | | | | |
| | | Cell line- | Unedited | 107256 | 107148 | 0 |
| | | 001 | Control | | | |
| | | Cell line- | Unedited | 97718 | 97610 | 0 |
| | | 002 | Control | | | |
| | | Cell line- | Unedited | 112595 | 112492 | 0 |
| | | 003 | Control | | | |
| | 6271-OT7 | Cell line- | | 87913 | 87824 | 0 |
| | | 001 | | | | |
| | | Cell line- | | 93468 | 93360 | 0 |
| | | 002 | | | | |
| | | Cell line- | | 105762 | 105660 | 0 |
| | | 003 | | | | |
| | | Cell line- | Unedited | 93347 | 93211 | 0 |
| | | 001 | Control | | | |
| | | Cell line- | Unedited | 80444 | 80330 | 0 |
| | | 002 | Control | | | |
| | | Cell line- | Unedited | 107802 | 107695 | 0 |
| | | 003 | Control | | | |
| | 6271-OT8 | Cell line- | | 175435 | 175036 | 0.063654095 |
| | | 001 | | | | |
| | | Cell line- | | 141145 | 140891 | 0 |
| | | 002 | | | | |
| | | Cell line- | | 158861 | 158578 | 0 |
| | | 003 | | | | |
| | | Cell line- | Unedited | 152576 | 152316 | 0 |
| | | 001 | Control | | | |
| | | Cell line- | Unedited | 144367 | 144095 | 0 |
| | | 002 | Control | | | |
| | | Cell line- | Unedited | 144801 | 144532 | 0.074236425 |
| | | 003 | Control | | | |
| | 6271-OT9 | Cell line- | | 162750 | 162305 | 0 |
| | | 001 | | | | |
| | | Cell line- | | 138905 | 138526 | 0 |
| | | 002 | | | | |
| | | Cell line- | | 158137 | 157758 | 0 |
| | | 003 | | | | |
| | | Cell line- | Unedited | 144593 | 144254 | 0 |
| | | 001 | Control | | | |
| | | Cell line- | Unedited | 142405 | 142079 | 0 |
| | | 002 | Control | | | |
| | | Cell line- | Unedited | 142660 | 142295 | 0 |
| | | 003 | Control | | | |
| | 6271-OT10 | Cell line- | | 155507 | 155136 | 0 |
| | | 001 | | | | |
| | | Cell line- | | 125587 | 125379 | 0 |
| | | 002 | | | | |
| | | Cell line- | | 169473 | 169177 | 0 |
| | | 003 | | | | |
| | | Cell line- | Unedited | 148437 | 148146 | 0 |
| | | 001 | Control | | | |
| | | Cell line- | Unedited | 135334 | 135055 | 0 |
| | | 002 | Control | | | |
| | | Cell line- | Unedited | 132203 | 131957 | 0 |
| | | 003 | Control | | | |
| | 6271-OT11 | Cell line- | | 230065 | 229074 | 0 |
| | | 001 | | | | |
| | | Cell line- | | 178881 | 178373 | 0 |
| | | 002 | | | | |
| | | Cell line- | | 179163 | 178461 | 0 |
| | | 003 | | | | |
| | | Cell line- | Unedited | 186342 | 185739 | 0 |
| | | 001 | Control | | | |
| | | Cell line- | Unedited | 170231 | 169676 | 0 |
| | | 002 | Control | | | |
| | | Cell line- | Unedited | 149920 | 149193 | 0 |
| | | 003 | Control | | | |
| | 6271-OT12 | Cell line- | | 201631 | 201029 | 0 |
| | | 001 | | | | |
| | | Cell line- | | 169157 | 168387 | 0 |
| | | 002 | | | | |
| | | Cell line- | | 194148 | 193574 | 0 |
| | | 003 | | | | |
| | | Cell line- | Unedited | 195198 | 194614 | 0 |
| | | 001 | Control | | | |
| | | Cell line- | Unedited | 193695 | 192547 | 0 |
| | | 002 | Control | | | |
| | | Cell line- | Unedited | 204027 | 203298 | 0 |
| | | 003 | Control | | | |
| | 6271-OT13 | Cell line- | | 199418 | 195446 | 0 |
| | | 001 | | | | |
| | | Cell line- | | 212671 | 207564 | 0 |
| | | 002 | | | | |
| | | Cell line- | | 183122 | 181065 | 0 |
| | | 003 | | | | |
| | | Cell line- | Unedited | 182743 | 176875 | 0 |
| | | 001 | Control | | | |
| | | Cell line- | Unedited | 199049 | 193649 | 0 |
| | | 002 | Control | | | |
| | | Cell line- | Unedited | 200690 | 199042 | 0 |
| | | 003 | Control | | | |
| | 6271-OT14 | Cell line- | | 257180 | 256506 | 0 |
| | | 001 | | | | |
| | | Cell line- | | 166763 | 166325 | 0 |
| | | 002 | | | | |
| | | Cell line- | | 209061 | 208421 | 0 |
| | | 003 | | | | |
| | | Cell line- | Unedited | 195205 | 194698 | 0 |
| | | 001 | Control | | | |
| | | Cell line- | Unedited | 178902 | 178454 | 0 |
| | | 002 | Control | | | |
| | | Cell line- | Unedited | 163505 | 163052 | 0 |
| | | 003 | Control | | | |
| | 6271-OT15 | Cell line- | | 156149 | 155612 | 0 |
| | | 001 | | | | |
| | | Cell line- | | 143876 | 143394 | 0 |
| | | 002 | | | | |
| | | Cell line- | | 134749 | 134159 | 0 |
| | | 003 | | | | |
| | | Cell line- | Unedited | 128772 | 128158 | 0 |
| | | 001 | Control | | | |
| | | Cell line- | Unedited | 130433 | 129871 | 0 |
| | | 002 | Control | | | |
| | | Cell line- | Unedited | 127795 | 127261 | 0 |
| | | 003 | Control | | | |
| | 6271-OT16 | Cell line- | | 218883 | 217525 | 0.205181847 |
| | | 001 | | | | |
| | | Cell line- | | 221905 | 220641 | 0 |
| | | 002 | | | | |
| | | Cell line- | | 218335 | 217139 | 0 |
| | | 003 | | | | |
| | | Cell line- | Unedited | 186209 | 184963 | 0.508526331 |
| | | 001 | Control | | | |
| | | Cell line- | Unedited | 157542 | 156499 | 0 |
| | | 002 | Control | | | |
| | | Cell line- | Unedited | 188754 | 187277 | 0 |
| | | 003 | Control | | | |
| | 6271-OT17 | Cell line- | | 161453 | 161278 | 0 |
| | | 001 | | | | |
| | | Cell line- | | 178504 | 178281 | 0 |
| | | 002 | | | | |
| | | Cell line- | | 206030 | 205835 | 0 |
| | | 003 | | | | |
| | | Cell line- | Unedited | 197133 | 196908 | 0 |
| | | 001 | Control | | | |
| | | Cell line- | Unedited | 202015 | 201758 | 0 |
| | | 002 | Control | | | |
| | | Cell line- | Unedited | 161561 | 161262 | 0 |
| | | 003 | Control | | | |
| | 6271-OT18 | Cell line- | | 183539 | 183229 | 0 |
| | | 001 | | | | |
| | | Cell line- | | 166137 | 165905 | 0 |
| | | 002 | | | | |
| | | Cell line- | | 179771 | 179484 | 0 |
| | | 003 | | | | |
| | | Cell line- | Unedited | 189315 | 188984 | 0 |
| | | 001 | Control | | | |
| | | Cell line- | Unedited | 189606 | 189309 | 0 |
| | | 002 | Control | | | |
| | | Cell line- | Unedited | 216196 | 215840 | 0 |
| | | 003 | Control | | | |
| | 6271-OT19 | Cell line- | | 257542 | 257055 | 0.129616344 |
| | | 001 | | | | |
| | | Cell line- | | 241668 | 241322 | 0 |
| | | 002 | | | | |
| | | Cell line- | | 279941 | 279535 | 0 |
| | | 003 | | | | |
| | | Cell line- | Unedited | 262690 | 262280 | 0 |
| | | 001 | Control | | | |
| | | Cell line- | Unedited | 183889 | 183619 | 0 |
| | | 002 | Control | | | |
| | | Cell line- | Unedited | 320822 | 320290 | 0 |
| | | 003 | Control | | | |
| | 6271-OT20 | Cell line- | | 186375 | 186047 | 0 |
| | | 001 | | | | |
| | | Cell line- | | 183917 | 183648 | 0 |
| | | 002 | | | | |
| | | Cell line- | | 177736 | 177472 | 0 |
| | | 003 | | | | |
| | | Cell line- | Unedited | 190109 | 189814 | 0 |
| | | 001 | Control | | | |
| | | Cell line- | Unedited | 154204 | 153934 | 0 |
| | | 002 | Control | | | |
| | | Cell line- | Unedited | 163757 | 163115 | 0 |
| | | 003 | Control | | | |
| | 6271-OT21 | Cell line- | | 168503 | 167900 | 0 |
| | | 001 | | | | |
| | | Cell line- | | 176993 | 176544 | 0 |
| | | 002 | | | | |
| | | Cell line- | | 171154 | 164588 | 0 |
| | | 003 | | | | |
| | | Cell line- | Unedited | 181941 | 181390 | 0 |
| | | 001 | Control | | | |
| | | Cell line- | Unedited | 178876 | 178288 | 0 |
| | | 002 | Control | | | |
| | | Cell line- | Unedited | 233701 | 233053 | 0 |
| | | 003 | Control | | | |
| | 6271-OT22 | Cell line- | | 188272 | 187328 | 0 |
| | | 001 | | | | |
| | | Cell line- | | 185845 | 184925 | 0 |
| | | 002 | | | | |
| | | Cell line- | | 179229 | 178181 | 0 |
| | | 003 | | | | |
| | | Cell line- | Unedited | 189825 | 189033 | 0 |
| | | 001 | Control | | | |
| | | Cell line- | Unedited | 188151 | 187304 | 0 |
| | | 002 | Control | | | |
| | | Cell line- | Unedited | 205668 | 204481 | 0 |
| | | 003 | Control | | | |
| | 6271-OT23 | Cell line- | | 200089 | 199664 | 0 |
| | | 001 | | | | |
| | | Cell line- | | 180170 | 179674 | 0 |
| | | 002 | | | | |
| | | Cell line- | | 186611 | 186174 | 0 |
| | | 003 | | | | |
| | | Cell line- | Unedited | 171180 | 170783 | 0 |
| | | 001 | Control | | | |
| | | Cell line- | Unedited | 169326 | 168821 | 0 |
| | | 002 | Control | | | |
| | | Cell line- | Unedited | 221074 | 219473 | 0 |
| | | 003 | Control | | | |
| | 6271-OT24 | Cell line- | | 312973 | 312435 | 0 |
| | | 001 | | | | |
| | | Cell line- | | 234579 | 234243 | 0 |
| | | 002 | | | | |
| | | Cell line- | | 363235 | 362788 | 0 |
| | | 003 | | | | |
| | | Cell line- | Unedited | 358661 | 358169 | 0 |
| | | 001 | Control | | | |
| | | Cell line- | Unedited | 319366 | 318906 | 0 |
| | | 002 | Control | | | |
| | | Cell line- | Unedited | 210693 | 210341 | 0 |
| | | 003 | Control | | | |
| | 6271-OT25 | Cell line- | | 279203 | 278711 | 0 |
| | | 001 | | | | |
| | | Cell line- | | 238603 | 238250 | 0 |
| | | 002 | | | | |
| | | Cell line- | | 293612 | 293248 | 0 |
| | | 003 | | | | |
| | | Cell line- | Unedited | 214910 | 214580 | 0 |
| | | 001 | Control | | | |
| | | Cell line- | Unedited | 242210 | 241854 | 0 |
| | | 002 | Control | | | |
| | | Cell line- | Unedited | 246040 | 245675 | 0 |
| | | 003 | Control | | | |
| | 6271-OT26 | Cell line- | | 201955 | 201397 | 0 |
| | | 001 | | | | |
| | | Cell line- | | 192004 | 191423 | 0 |
| | | 002 | | | | |
| | | Cell line- | | 221068 | 220789 | 0 |
| | | 003 | | | | |
| | | Cell line- | Unedited | 72423 | 76514 | 0 |
| | | 001 | Control | | | |
| | | Cell line- | Unedited | 147010 | 150138 | 0 |
| | | 002 | Control | | | |
| | | Cell line- | Unedited | 180906 | 185409 | 0 |
| | | 003 | Control | | | |
| | 6271-OT27 | Cell line- | | 231554 | 230840 | 0 |
| | | 001 | | | | |
| | | Cell line- | | 287122 | 286324 | 0 |
| | | 002 | | | | |
| | | Cell line- | | 257135 | 256252 | 0 |
| | | 003 | | | | |
| | | Cell line- | Unedited | 308252 | 307539 | 0 |
| | | 001 | Control | | | |
| | | Cell line- | Unedited | 263362 | 262487 | 0 |
| | | 002 | Control | | | |
| | | Cell line- | Unedited | 220037 | 219165 | 0 |
| | | 003 | Control | | | |
| | 6271-OT28 | Cell line- | | 210649 | 210376 | 0 |
| | | 001 | | | | |
| | | Cell line- | | 323418 | 323118 | 0 |
| | | 002 | | | | |
| | | Cell line- | | 155433 | 155227 | 0 |
| | | 003 | | | | |
| | | Cell line- | Unedited | 197948 | 197705 | 0 |
| | | 001 | Control | | | |
| | | Cell line- | Unedited | 134533 | 134363 | 0 |
| | | 002 | Control | | | |
| | | Cell line- | Unedited | 212419 | 212189 | 0 |
| | | 003 | Control | | | |
| | 6271-OT29 | Cell line- | | 146183 | 145932 | 0 |
| | | 001 | | | | |
| | | Cell line- | | 131424 | 131240 | 0 |
| | | 002 | | | | |
| | | Cell line- | | 143192 | 143006 | 0 |
| | | 003 | | | | |
| | | Cell line- | Unedited | 330908 | 330528 | 0.057864524 |
| | | 001 | Control | | | |
| | | Cell line- | Unedited | 286415 | 286065 | 0.049588241 |
| | | 002 | Control | | | |
| | | Cell line- | Unedited | 259549 | 259254 | 0.055883606 |
| | | 003 | Control | | | |
| | 6271-OT30 | Cell line- | | 281060 | 280848 | 0 |
| | | 001 | | | | |
| | | Cell line- | | 221334 | 221187 | 0 |
| | | 002 | | | | |
| | | Cell line- | | 207473 | 207332 | 0 |
| | | 003 | | | | |
| | | Cell line- | Unedited | 209029 | 208851 | 0 |
| | | 001 | Control | | | |
| | | Cell line- | Unedited | 122708 | 122610 | 0 |
| | | 002 | Control | | | |
| | | Cell line- | Unedited | 124513 | 124358 | 0 |
| | | 003 | Control | | | |
| SGN006272 | 6272-OT1 | Cell line- | | 161319 | 160734 | 0 |
| | | 001 | | | | |
| | | Cell line- | | 143745 | 143201 | 0 |
| | | 002 | | | | |
| | | Cell line- | | 155430 | 154909 | 0 |
| | | 003 | | | | |
| | | Cell line- | Unedited | 164122 | 163466 | 0 |
| | | 001 | Control | | | |
| | | Cell line- | Unedited | 142671 | 142102 | 0 |
| | | 002 | Control | | | |
| | | Cell line- | Unedited | 128436 | 127857 | 0 |
| | | 003 | Control | | | |
| | 6272-OT2 | Cell line- | | 158097 | 157759 | 0 |
| | | 001 | | | | |
| | | Cell line- | | 165435 | 165162 | 0 |
| | | 002 | | | | |
| | | Cell line- | | 144895 | 144640 | 0 |
| | | 003 | | | | |
| | | Cell line- | Unedited | 192143 | 191778 | 0 |
| | | 001 | Control | | | |
| | | Cell line- | Unedited | 158232 | 157934 | 0 |
| | | 002 | Control | | | |
| | | Cell line- | Unedited | 167450 | 167128 | 0 |
| | | 003 | Control | | | |
| | 6272-OT3 | Cell line- | | 212526 | 212196 | 0 |
| | | 001 | | | | |
| | | Cell line- | | 99341 | 99176 | 0 |
| | | 002 | | | | |
| | | Cell line- | | 165306 | 165058 | 0 |
| | | 003 | | | | |
| | | Cell line- | Unedited | 112049 | 111865 | 0 |
| | | 001 | Control | | | |
| | | Cell line- | Unedited | 165296 | 165036 | 0 |
| | | 002 | Control | | | |
| | | Cell line- | Unedited | 108413 | 108241 | 0 |
| | | 003 | Control | | | |
| | 6272-OT4 | Cell line- | | 130088 | 129914 | 0 |
| | | 001 | | | | |
| | | Cell line- | | 120296 | 120177 | 0 |
| | | 002 | | | | |
| | | Cell line- | | 101671 | 101533 | 0 |
| | | 003 | | | | |
| | | Cell line- | Unedited | 109505 | 109337 | 0 |
| | | 001 | Control | | | |
| | | Cell line- | Unedited | 163962 | 163736 | 0 |
| | | 002 | Control | | | |
| | | Cell line- | Unedited | 78803 | 78682 | 0 |
| | | 003 | Control | | | |
| | 6272-OT5 | Cell line- | | 216728 | 216472 | 0 |
| | | 001 | | | | |
| | | Cell line- | | 179400 | 179219 | 0 |
| | | 002 | | | | |
| | | Cell line- | | 137480 | 137349 | 0 |
| | | 003 | | | | |
| | | Cell line- | Unedited | 134021 | 133860 | 0 |
| | | 001 | Control | | | |
| | | Cell line- | Unedited | 105594 | 105450 | 0 |
| | | 002 | Control | | | |
| | | Cell line- | Unedited | 101639 | 101524 | 0 |
| | | 003 | Control | | | |
| | 6272-OT6 | Cell line- | | 126751 | 126681 | 0 |
| | | 001 | | | | |
| | | Cell line- | | 112856 | 112761 | 0 |
| | | 002 | | | | |
| | | Cell line- | | 145660 | 145577 | 0 |
| | | 003 | | | | |
| | | Cell line- | Unedited | 129954 | 129858 | 0 |
| | | 001 | Control | | | |
| | | Cell line- | Unedited | 112629 | 112557 | 0 |
| | | 002 | Control | | | |
| | | Cell line- | Unedited | 128767 | 128514 | 0 |
| | | 003 | Control | | | |
| | 6272-OT7 | Cell line- | | 191577 | 191199 | 0 |
| | | 001 | | | | |
| | | Cell line- | | 161504 | 161206 | 0 |
| | | 002 | | | | |
| | | Cell line- | | 232045 | 231661 | 0 |
| | | 003 | | | | |
| | | Cell line- | Unedited | 198473 | 198150 | 0 |
| | | 001 | Control | | | |
| | | Cell line- | Unedited | 210432 | 210107 | 0 |
| | | 002 | Control | | | |
| | | Cell line- | Unedited | 157126 | 156707 | 0 |
| | | 003 | Control | | | |
| | 6272-OT8 | Cell line- | | 411307 | 410981 | 0 |
| | | 001 | | | | |
| | | Cell line- | | 182008 | 181862 | 0 |
| | | 002 | | | | |
| | | Cell line- | | 418721 | 418363 | 0 |
| | | 003 | | | | |
| | | Cell line- | Unedited | 322326 | 322044 | 0 |
| | | 001 | Control | | | |
| | | Cell line- | Unedited | 123729 | 123662 | 0 |
| | | 002 | Control | | | |
| | | Cell line- | Unedited | 252434 | 252252 | 0 |
| | | 003 | Control | | | |
| | 6272-OT9 | Cell line- | | 207447 | 206904 | 0 |
| | | 001 | | | | |
| | | Cell line- | | 183068 | 182709 | 0.060866293 |
| | | 002 | | | | |
| | | Cell line- | | 217309 | 216928 | 0.050805429 |
| | | 003 | | | | |
| | | Cell line- | Unedited | 189090 | 188769 | 0.055674220 |
| | | 001 | Control | | | |
| | | Cell line- | Unedited | 210561 | 210214 | 0.059167328 |
| | | 002 | Control | | | |
| | | Cell line- | Unedited | 408748 | 408171 | 0.086875167 |
| | | 003 | Control | | | |
| | 6272-OT10 | Cell line- | | 169209 | 168961 | 0 |
| | | 001 | | | | |
| | | Cell line- | | 156585 | 156410 | 0 |
| | | 002 | | | | |
| | | Cell line- | | 178619 | 178407 | 0 |
| | | 003 | | | | |
| | | Cell line- | Unedited | 159449 | 159225 | 0 |
| | | 001 | Control | | | |
| | | Cell line- | Unedited | 166621 | 166417 | 0 |
| | | 002 | Control | | | |
| | | Cell line- | Unedited | 176498 | 176261 | 0 |
| | | 003 | Control | | | |
| | 6272-OT11 | Cell line- | | 189155 | 188853 | 0 |
| | | 001 | | | | |
| | | Cell line- | | 171792 | 171533 | 0 |
| | | 002 | | | | |
| | | Cell line- | | 202078 | 201810 | 0 |
| | | 003 | | | | |
| | | Cell line- | Unedited | 203956 | 203704 | 0 |
| | | 001 | Control | | | |
| | | Cell line- | Unedited | 177280 | 177035 | 0 |
| | | 002 | Control | | | |
| | | Cell line- | Unedited | 204899 | 204633 | 0 |
| | | 003 | Control | | | |
| | 6272-OT12 | Cell line- | | 152236 | 152073 | 0 |
| | | 001 | | | | |
| | | Cell line- | | 92112 | 92014 | 0 |
| | | 002 | | | | |
| | | Cell line- | | 199569 | 199423 | 0 |
| | | 003 | | | | |
| | | Cell line- | Unedited | 139415 | 139263 | 0 |
| | | 001 | Control | | | |
| | | Cell line- | Unedited | 207342 | 207127 | 0 |
| | | 002 | Control | | | |
| | | Cell line- | Unedited | 244685 | 244454 | 0 |
| | | 003 | Control | | | |
| | 6272-OT13 | Cell line- | | 175809 | 175516 | 0 |
| | | 001 | | | | |
| | | Cell line- | | 131510 | 131202 | 0 |
| | | 002 | | | | |
| | | Cell line- | | 148836 | 148581 | 0 |
| | | 003 | | | | |
| | | Cell line- | Unedited | 113258 | 112987 | 0 |
| | | 001 | Control | | | |
| | | Cell line- | Unedited | 179908 | 179492 | 0 |
| | | 002 | Control | | | |
| | | Cell line- | Unedited | 260234 | 259820 | 0 |
| | | 003 | Control | | | |
| | 6272-OT14 | Cell line- | | 118433 | 118314 | 0 |
| | | 001 | | | | |
| | | Cell line- | | 193904 | 193734 | 0 |
| | | 002 | | | | |
| | | Cell line- | | 121126 | 121000 | 0 |
| | | 003 | | | | |
| | | Cell line- | Unedited | 136048 | 135917 | 0 |
| | | 001 | Control | | | |
| | | Cell line- | Unedited | 111992 | 111863 | 0 |
| | | 002 | Control | | | |
| | | Cell line- | Unedited | 201265 | 201038 | 0 |
| | | 003 | Control | | | |
| | 6272-OT15 | Cell line- | | 126465 | 126306 | 0 |
| | | 001 | | | | |
| | | Cell line- | | 98514 | 98390 | 0 |
| | | 002 | | | | |
| | | Cell line- | | 115381 | 115230 | 0 |
| | | 003 | | | | |
| | | Cell line- | Unedited | 112070 | 111937 | 0 |
| | | 001 | Control | | | |
| | | Cell line- | Unedited | 158874 | 158692 | 0 |
| | | 002 | Control | | | |
| | | Cell line- | Unedited | 213771 | 213342 | 0 |
| | | 003 | Control | | | |
| | 6272-OT16 | Cell line- | | 136275 | 135960 | 0 |
| | | 001 | | | | |
| | | Cell line- | | 116080 | 115861 | 0 |
| | | 002 | | | | |
| | | Cell line- | | 120286 | 120052 | 0 |
| | | 003 | | | | |
| | | Cell line- | Unedited | 112610 | 112409 | 0 |
| | | 001 | Control | | | |
| | | Cell line- | Unedited | 105762 | 105551 | 0 |
| | | 002 | Control | | | |
| | | Cell line- | Unedited | 105739 | 105521 | 0 |
| | | 003 | Control | | | |
| | 6272-OT17 | Cell line- | | 159809 | 159483 | 0 |
| | | 001 | | | | |
| | | Cell line- | | 138626 | 138353 | 0 |
| | | 002 | | | | |
| | | Cell line- | | 163538 | 163258 | 0 |
| | | 003 | | | | |
| | | Cell line- | Unedited | 170278 | 169941 | 0 |
| | | 001 | Control | | | |
| | | Cell line- | Unedited | 121795 | 121504 | 0 |
| | | 002 | Control | | | |
| | | Cell line- | Unedited | 123971 | 123746 | 0 |
| | | 003 | Control | | | |
| | 6272-OT18 | Cell line- | | 140493 | 140322 | 0 |
| | | 001 | | | | |
| | | Cell line- | | 129868 | 129716 | 0 |
| | | 002 | | | | |
| | | Cell line- | | 123585 | 123426 | 0 |
| | | 003 | | | | |
| | | Cell line- | Unedited | 140062 | 139862 | 0 |
| | | 001 | Control | | | |
| | | Cell line- | Unedited | 130705 | 130552 | 0 |
| | | 002 | Control | | | |
| | | Cell line- | Unedited | 147735 | 147562 | 0 |
| | | 003 | Control | | | |
| | 6272-OT19 | Cell line- | | 117945 | 117786 | 0 |
| | | 001 | | | | |
| | | Cell line- | | 116130 | 115944 | 0 |
| | | 002 | | | | |
| | | Cell line- | | 105551 | 105398 | 0 |
| | | 003 | | | | |
| | | Cell line- | Unedited | 114475 | 114286 | 0 |
| | | 001 | Control | | | |
| | | Cell line- | Unedited | 88553 | 88381 | 0 |
| | | 002 | Control | | | |
| | | Cell line- | Unedited | 138950 | 138724 | 0 |
| | | 003 | Control | | | |

TABLE 9
Primer sequences for amplification of the off-target sites.

| | Off- | | Left | Right |
|---|---|---|---|---|
| Off- | Target | | Primer | Primer |
| Target | SEQ | | SEQ | SEQ ID |
| Number | ID NO: | Chromosome | ID NO: | NO: |
| 5637- | 221 | 17 | 329 | 437 |
| OT1 | | | | |
| 5637- | 222 | 16 | 330 | 438 |
| OT2 | | | | |
| 5637- | 223 | 8 | 331 | 439 |
| OT3 | | | | |
| 5637- | 224 | 22 | 332 | 440 |
| OT4 | | | | |
| 5637- | 225 | 8 | 333 | 441 |
| OT5 | | | | |
| 5637- | 226 | 21 | 334 | 442 |
| OT6 | | | | |
| 5637- | 227 | 12 | 335 | 443 |
| OT7 | | | | |
| 5637- | 228 | 12 | 336 | 444 |
| OT8 | | | | |
| 5637- | 229 | 8 | 337 | 445 |
| OT9 | | | | |
| 5637- | 230 | 19 | 338 | 446 |
| OT10 | | | | |
| 5637- | 231 | 18 | 339 | 447 |
| OT11 | | | | |
| 5637- | 232 | 22 | 340 | 448 |
| OT12 | | | | |
| 5637- | 233 | 21 | 341 | 449 |
| OT13 | | | | |
| 5637- | 234 | 17 | 342 | 450 |
| OT14 | | | | |
| 5637- | 235 | 18 | 343 | 451 |
| OT15 | | | | |
| 5637- | 236 | 4 | 344 | 452 |
| OT16 | | | | |
| 5637- | 237 | 17 | 345 | 453 |
| OT17 | | | | |
| 5637- | 238 | 17 | 346 | 454 |
| OT18 | | | | |
| 5637- | 239 | 17 | 347 | 455 |
| OT19 | | | | |
| 5637- | 240 | 11 | 348 | 456 |
| OT20 | | | | |
| 5637- | 241 | 15 | 349 | 457 |
| OT21 | | | | |
| 5637- | 242 | 22 | 350 | 458 |
| OT22 | | | | |
| 5637- | 243 | 7 | 351 | 459 |
| OT23 | | | | |
| 5637- | 244 | 16 | 352 | 460 |
| OT24 | | | | |
| 5637- | 245 | 8 | 353 | 461 |
| OT25 | | | | |
| 5637- | 246 | 2 | 354 | 462 |
| OT26 | | | | |
| 5637- | 247 | 9 | 355 | 463 |
| OT27 | | | | |
| 5637- | 248 | 19 | 356 | 464 |
| OT28 | | | | |
| 5637- | 249 | 8 | 357 | 465 |
| OT29 | | | | |
| 5637- | 250 | 2 | 358 | 466 |
| OT30 | | | | |
| 5637- | 25 | 2 | 359 | 467 |
| OT31 | | | | |
| 5637- | 252 | 4 | 360 | 468 |
| OT32 | | | | |
| 5637- | 253 | 17 | 361 | 469 |
| OT33 | | | | |
| 5637- | 254 | 6 | 362 | 470 |
| OT34 | | | | |
| 5637- | 25 | 2 | 363 | 471 |
| OT35 | | | | |
| 5637- | 256 | 14 | 364 | 472 |
| OT36 | | | | |
| 5637- | 257 | 8 | 365 | 473 |
| OT37 | | | | |
| 5641- | 258 | 1 | 366 | 474 |
| OT1 | | | | |
| 5641- | 259 | 17 | 367 | 475 |
| OT2 | | | | |
| 5641- | 260 | 20 | 368 | 476 |
| OT3 | | | | |
| 5641- | 261 | 20 | 369 | 47 |
| OT4 | | | | |
| 5641- | 262 | 13 | 370 | 478 |
| OT5 | | | | |
| 5641- | 263 | 8 | 371 | 479 |
| OT6 | | | | |
| 5641- | 264 | 20 | 372 | 480 |
| OT7 | | | | |
| 5641- | 265 | 17 | 373 | 481 |
| OT8 | | | | |
| 5641- | 266 | 21 | 374 | 482 |
| OT9 | | | | |
| 5641- | 267 | 8 | 375 | 483 |
| OT10 | | | | |
| 5641- | 268 | 5 | 376 | 484 |
| OT11 | | | | |
| 5641- | 269 | 22 | 377 | 485 |
| OT12 | | | | |
| 5641- | 270 | 10 | 378 | 486 |
| OT13 | | | | |
| 5641- | 27 | 19 | 379 | 487 |
| OT14 | | | | |
| 5641- | 272 | 1 | 380 | 488 |
| OT15 | | | | |
| 5649- | 273 | 14 | 381 | 489 |
| OT1 | | | | |
| 5707- | 274 | 12 | 382 | 490 |
| OT1 | | | | |
| 5707- | 275 | 22 | 383 | 49 |
| OT2 | | | | |
| 5707- | 276 | 1 | 384 | 492 |
| OT3 | | | | |
| 5707- | 277 | 6 | 385 | 493 |
| OT4 | | | | |
| 5707- | 278 | 10 | 386 | 494 |
| OT5 | | | | |
| 5707- | 279 | 14 | 387 | 495 |
| OT6 | | | | |
| 6271- | 280 | 1 | 388 | 496 |
| OT1 | | | | |
| 6271- | 281 | 9 | 389 | 497 |
| OT2 | | | | |
| 6271- | 282 | 15 | 390 | 498 |
| OT3 | | | | |
| 6271- | 283 | 10 | 391 | 499 |
| OT4 | | | | |
| 6271- | 284 | 8 | 392 | 500 |
| OT5 | | | | |
| 6271- | 285 | 13 | 393 | 501 |
| OT6 | | | | |
| 6271- | 286 | 13 | 394 | 502 |
| OT7 | | | | |
| 6271- | 287 | 3 | 395 | 503 |
| OT8 | | | | |
| 6271- | 288 | 17 | 396 | 504 |
| OT9 | | | | |
| 6271- | 289 | 1 | 397 | 505 |
| OT10 | | | | |
| 6271- | 290 | 2 | 398 | 506 |
| OT11 | | | | |
| 6271- | 291 | 13 | 399 | 507 |
| OT12 | | | | |
| 6271- | 292 | 14 | 400 | 508 |
| OT13 | | | | |
| 6271- | 293 | 21 | 40 | 509 |
| OT14 | | | | |
| 6271- | 294 | 14 | 402 | 510 |
| OT15 | | | | |
| 6271- | 295 | 15 | 403 | 511 |
| OT16 | | | | |
| 6271- | 296 | 17 | 404 | 512 |
| OT17 | | | | |
| 6271- | 297 | 10 | 405 | 513 |
| OT18 | | | | |
| 6271- | 298 | 10 | 406 | 514 |
| OT19 | | | | |
| 6271- | 299 | 3 | 407 | 515 |
| OT20 | | | | |
| 6271- | 300 | 20 | 408 | 516 |
| OT21 | | | | |
| 6271- | 301 | 15 | 409 | 517 |
| OT22 | | | | |
| 6271- | 302 | 2 | 410 | 518 |
| OT23 | | | | |
| 6271- | 303 | 1 | 411 | 519 |
| OT24 | | | | |
| 6271- | 304 | 19 | 412 | 520 |
| OT25 | | | | |
| 6271- | 305 | 22 | 413 | 521 |
| OT26 | | | | |
| 6271- | 306 | 18 | 414 | 522 |
| OT27 | | | | |
| 6271- | 307 | 19 | 415 | 523 |
| OT28 | | | | |
| 6271- | 308 | 17 | 416 | 524 |
| OT29 | | | | |
| 6271- | 309 | 3 | 417 | 525 |
| OT30 | | | | |
| 6272- | 310 | 11 | 418 | 526 |
| OT1 | | | | |
| 6272- | 311 | 1 | 419 | 527 |
| OT2 | | | | |
| 6272- | 312 | 20 | 420 | 528 |
| OT3 | | | | |
| 6272- | 313 | 9 | 421 | 529 |
| OT4 | | | | |
| 6272- | 314 | 5 | 422 | 530 |
| OT5 | | | | |
| 6272- | 315 | 3 | 423 | 531 |
| OT6 | | | | |
| 6272- | 316 | 15 | 424 | 532 |
| OT7 | | | | |
| 6272- | 317 | 17 | 425 | 533 |
| OT8 | | | | |
| 6272- | 318 | 15 | 426 | 534 |
| OT9 | | | | |
| 6272- | 319 | 10 | 427 | 535 |
| OT10 | | | | |
| 6272- | 320 | 15 | 428 | 536 |
| OT11 | | | | |
| 6272- | 321 | 10 | 429 | 537 |
| OT12 | | | | |
| 6272- | 322 | 8 | 430 | 538 |
| OT13 | | | | |
| 6272- | 323 | 13 | 431 | 539 |
| OT14 | | | | |
| 6272- | 324 | 13 | 432 | 540 |
| OT15 | | | | |
| 6272- | 325 | 3 | 433 | 541 |
| OT16 | | | | |
| 6272- | 326 | 17 | 434 | 542 |
| OT17 | | | | |
| 6272- | 327 | 13 | 435 | 543 |
| OT18 | | | | |
| 6272- | 328 | 1 | 436 | 544 |
| OT19 | | | | |

TABLE 10
Description of Sequence Identifiers of the application

| SEQ ID NO | Description |
|---|---|
| 1 | SGN002770 spacer |
| 2 | SGN002770 target |
| 3 | SGN002771 spacer |
| 4 | SGN002771 target |
| 5 | SGN002772 spacer |
| 6 | SGN002772 target |
| 7 | SGN002773 spacer |
| 8 | SGN002773 target |
| 9 | SGN002774 spacer |
| 10 | SGN002774 target |
| 11 | SGN002775 spacer |
| 12 | SGN002775 target |
| 13 | SGN002776 spacer |
| 14 | SGN002776 target |
| 15 | SGN002777 spacer |
| 16 | SGN002777 target |
| 17 | SGN002778 spacer |
| 18 | SGN002778 target |
| 19 | SGN002779 spacer |
| 20 | SGN002779 target |
| 21 | SGN002780 spacer |
| 22 | SGN002780 target |
| 23 | SGN002781 spacer |
| 24 | SGN002781 target |
| 25 | SGN002782 spacer |
| 26 | SGN002782 target |
| 27 | SGN002783 spacer |
| 28 | SGN002783 target |
| 29 | SGN002784 spacer |
| 30 | SGN002784 target |
| 31 | SGN002785 spacer |
| 32 | SGN002785 target |
| 33 | SGN002786 spacer |
| 34 | SGN002786 target |
| 35 | SGN002787 spacer |
| 36 | SGN002787 target |
| 37 | SGN002788 spacer |
| 38 | SGN002788 target |
| 39 | SGN002789 spacer |
| 40 | SGN002789 target |
| 41 | SGN002790 spacer |
| 42 | SGN002790 target |
| 43 | SGN002791 spacer |
| 44 | SGN002791 target |
| 45 | SGN002792 spacer |
| 46 | SGN002792 target |
| 47 | SGN002793 spacer |
| 48 | SGN002793 target |
| 49 | SGN002794 spacer |
| 50 | SGN002794 target |
| 51 | SGN002795 spacer |
| 52 | SGN002795 target |
| 53 | SGN002796 spacer |
| 54 | SGN002796 target |
| 55 | SGN002797 spacer |
| 56 | SGN002797 target |
| 57 | SGN002798 spacer |
| 58 | SGN002798 target |
| 59 | SGN002799 spacer |
| 60 | SGN002799 target |
| 61 | SGN002800 spacer |
| 62 | SGN002800 target |
| 63 | SGN002801 spacer |
| 64 | SGN002801 target |
| 65 | SGN002802 spacer |
| 66 | SGN002802 target |
| 67 | SGN002803 spacer |
| 68 | SGN002803 target |
| 69 | SGN003378 spacer |
| 70 | SGN003378 target |
| 71 | SGN003379 spacer |
| 72 | SGN003379 target |
| 73 | SGN003380 spacer |
| 74 | SGN003380 target |
| 75 | SGN003381 spacer |
| 76 | SGN003381 target |
| 77 | SGN003382 spacer |
| 78 | SGN003382 target |
| 79 | SGN003383 spacer |
| 80 | SGN003383 target |
| 81 | SGN003384 spacer |
| 82 | SGN003384 target |
| 83 | SGN005042 spacer |
| 84 | SGN005042 target |
| 85 | SGN005043 spacer |
| 86 | SGN005043 target |
| 87 | SGN005044 spacer |
| 88 | SGN005044 target |
| 89 | SGN005050 spacer |
| 90 | SGN005050 target |
| 91 | SGN005051 spacer |
| 92 | SGN005051 target |
| 93 | SGN005052 spacer |
| 94 | SGN005052 target |
| 95 | SGN005053 spacer |
| 96 | SGN005053 target |
| 97 | SGN005054 spacer |
| 98 | SGN005054 target |
| 99 | SGN005055 spacer |
| 100 | SGN005055 target |
| 101 | SGN005056 spacer |
| 102 | SGN005056 target |
| 103 | SGN005057 spacer |
| 104 | SGN005057 target |
| 105 | SGN005058 spacer |
| 106 | SGN005058 target |
| 107 | SGN005059 spacer |
| 108 | SGN005059 target |
| 109 | SGN005060 spacer |
| 110 | SGN005060 target |
| 111 | SGN005061 spacer |
| 112 | SGN005061 target |
| 113 | SGN005062 spacer |
| 114 | SGN005062 target |
| 115 | SGN005063 spacer |
| 116 | SGN005063 target |
| 117 | SGN005064 spacer |
| 118 | SGN005064 target |
| 119 | SGN005065 spacer |
| 120 | SGN005065 target |
| 121 | SGN005066 spacer |
| 122 | SGN005066 target |
| 123 | SGN005067 spacer |
| 124 | SGN005067 target |
| 125 | SGN005068 spacer |
| 126 | SGN005068 target |
| 127 | SGN005069 spacer |
| 128 | SGN005069 target |
| 129 | SGN005070 spacer |
| 130 | SGN005070 target |
| 131 | SGN005071 spacer |
| 132 | SGN005071 target |
| 133 | SGN005072 spacer |
| 134 | SGN005072 target |
| 135 | SGN005073 spacer |
| 136 | SGN005073 target |
| 137 | SGN005074 spacer |
| 138 | SGN005074 target |
| 139 | SGN005075 spacer |
| 140 | SGN005075 target |
| 141 | SGN005076 spacer |
| 142 | SGN005076 target |
| 143 | SGN005077 spacer |
| 144 | SGN005077 target |
| 145 | SGN005078 spacer |
| 146 | SGN005078 target |
| 147 | SGN005079 spacer |
| 148 | SGN005079 target |
| 149 | SGN005104 spacer |
| 150 | SGN005104 target |
| 151 | SGN005635 spacer |
| 152 | SGN005635 target |
| 153 | SGN005636 spacer |
| 154 | SGN005636 target |
| 155 | SGN005637 spacer |
| 156 | SGN005637 target |
| 157 | SGN005638 spacer |
| 158 | SGN005638 target |
| 159 | SGN005639 spacer |
| 160 | SGN005639 target |
| 161 | SGN005640 spacer |
| 162 | SGN005640 target |
| 163 | SGN005641 spacer |
| 164 | SGN005641 target |
| 165 | SGN005642 spacer |
| 166 | SGN005642 target |
| 167 | SGN005643 spacer |
| 168 | SGN005643 target |
| 169 | SGN005644 spacer |
| 170 | SGN005644 target |
| 171 | SGN005645 spacer |
| 172 | SGN005645 target |
| 173 | SGN005646 spacer |
| 174 | SGN005646 target |
| 175 | SGN005647 spacer |
| 176 | SGN005647 target |
| 177 | SGN005648 spacer |
| 178 | SGN005648 target |
| 179 | SGN005649 spacer |
| 180 | SGN005649 target |
| 181 | SGN005650 spacer |
| 182 | SGN005650 target |
| 183 | SGN005651 spacer |
| 184 | SGN005651 target |
| 185 | SGN005683, SGN005684, |
| | SGN005685, SGN005686, |
| | SGN005687, SGN005688, |
| | SGN005689, SGN005690, and |
| | SGN005691 spacer |
| 186 | SGN005683, SGN005684, |
| | SGN005685, SGN005686, |
| | SGN005687, SGN005688, |
| | SGN005689, SGN005690, and |
| | SGN005691 target |
| 187 | SGN005692, SGN005693, |
| | SGN005694, SGN005695, |
| | SGN005696, SGN005697, |
| | SGN005698, SGN005699, and |
| | SGN005700 spacer |
| 188 | SGN005692, SGN005693, |
| | SGN005694, SGN005695, |
| | SGN005696, SGN005697, |
| | SGN005698, SGN005699, and |
| | SGN005700 target |
| 189 | SGN005701, SGN005702, |
| | SGN005703, SGN005704, |
| | SGN005705, SGN005706, |
| | SGN005707, SGN005708, and |
| | SGN005709 spacer |
| 190 | SGN005701, SGN005702, |
| | SGN005703, SGN005704, |
| | SGN005705, SGN005706, |
| | SGN005707, SGN005708, and |
| | SGN005709 target |
| 191 | SGN005710, SGN005711, |
| | SGN005712, SGN005713, |
| | SGN005714, SGN005715, |
| | SGN005716, SGN005717, and |
| | SGN005718 spacer |
| 192 | SGN005710, SGN005711, |
| | SGN005712, SGN005713, |
| | SGN005714, SGN005715, |
| | SGN005716, SGN005717, and |
| | SGN005718 target |
| 193 | SGN006269 and SGN006272 spacer |
| 194 | SGN006269 and SGN006272 target |
| 195 | SGN006270 and SGN006273 spacer |
| 196 | SGN006270 and SGN006273 target |
| 197 | SGN006271 and SGN006274 spacer |
| 198 | SGN006271 and SGN006274 target |
| 199 | SGN006275 spacer |
| 200 | SGN006275 target |
| 201 | SGN006276 spacer |
| 202 | SGN006276 target |
| 203 | SGN006277 spacer |
| 204 | SGN006277 target |
| 205 | SGN006278 spacer |
| 206 | SGN006278 target |
| 207 | SGN006279 spacer |
| 208 | SGN006279 target |
| 209 | SGN006280 spacer |
| 210 | SGN006280 target |
| 211 | SGN006281 spacer |
| 212 | SGN006281 target |
| 213 | SGN006282 spacer |
| 214 | SGN006282 target |
| 215 | FOXP3-1 left primer |
| 216 | FOXP3-1 right primer |
| 217 | FOXP3-2 left primer |
| 218 | FOXP3-2 right primer |
| 219 | FOXP3-Exonl left primer |
| 220 | FOXP3-Exon1 right primer |
| 221 | 5637-OT1 off-target sequence |
| 222 | 5637-OT2 off-target sequence |
| 223 | 5637-OT3 off-target sequence |
| 224 | 5637-OT4 off-target sequence |
| 225 | 5637-OT5 off-target sequence |
| 226 | 5637-OT6 off-target sequence |
| 227 | 5637-OT7 off-target sequence |
| 228 | 5637-OT8 off-target sequence |
| 229 | 5637-OT9 off-target sequence |
| 230 | 5637-OT10 off-target sequence |
| 231 | 5637-OT11 off-target sequence |
| 232 | 5637-OT12 off-target sequence |
| 233 | 5637-OT13 off-target sequence |
| 234 | 5637-OT14 off-target sequence |
| 235 | 5637-OT15 off-target sequence |
| 236 | 5637-OT16 off-target sequence |
| 237 | 5637-OT17 off-target sequence |
| 238 | 5637-OT18 off-target sequence |
| 239 | 5637-OT19 off-target sequence |
| 240 | 5637-OT20 off-target sequence |
| 241 | 5637-OT21 off-target sequence |
| 242 | 5637-OT22 off-target sequence |
| 243 | 5637-OT23 off-target sequence |
| 244 | 5637-OT24 off-target sequence |
| 245 | 5637-OT25 off-target sequence |
| 246 | 5637-OT26 off-target sequence |
| 247 | 5637-OT27 off-target sequence |
| 248 | 5637-OT28 off-target sequence |
| 249 | 5637-OT29 off-target sequence |
| 250 | 5637-OT30 off-target sequence |
| 251 | 5637-OT31 off-target sequence |
| 252 | 5637-OT32 off-target sequence |
| 253 | 5637-OT33 off-target sequence |
| 254 | 5637-OT34 off-target sequence |
| 255 | 5637-OT35 off-target sequence |
| 256 | 5637-OT36 off-target sequence |
| 257 | 5637-OT37 off-target sequence |
| 258 | 5641-OT1 off-target sequence |
| 259 | 5641-OT2 off-target sequence |
| 260 | 5641-OT3 off-target sequence |
| 261 | 5641-OT4 off-target sequence |
| 262 | 5641-OT5 off-target sequence |
| 263 | 5641-OT6 off-target sequence |
| 264 | 5641-OT7 off-target sequence |
| 265 | 5641-OT8 off-target sequence |
| 266 | 5641-OT9 off-target sequence |
| 267 | 5641-OT10 off-target sequence |
| 268 | 5641-OT11 off-target sequence |
| 269 | 5641-OT12 off-target sequence |
| 270 | 5641-OT13 off-target sequence |
| 271 | 5641-OT14 off-target sequence |
| 272 | 5641-OT15 off-target sequence |
| 273 | 5649-OT1 off-target sequence |
| 274 | 5707-OT1 off-target sequence |
| 275 | 5707-OT2 off-target sequence |
| 276 | 5707-OT3 off-target sequence |
| 277 | 5707-OT4 off-target sequence |
| 278 | 5707-OT5 off-target sequence |
| 279 | 5707-OT6 off-target sequence |
| 280 | 6271-OT1 off-target sequence |
| 281 | 6271-OT2 off-target sequence |
| 282 | 6271-OT3 off-target sequence |
| 283 | 6271-OT4 off-target sequence |
| 284 | 6271-OT5 off-target sequence |
| 285 | 6271-OT6 off-target sequence |
| 286 | 6271-OT7 off-target sequence |
| 287 | 6271-OT8 off-target sequence |
| 288 | 6271-OT9 off-target sequence |
| 289 | 6271-OT10 off-target sequence |
| 290 | 6271-OT11 off-target sequence |
| 291 | 6271-OT12 off-target sequence |
| 292 | 6271-OT13 off-target sequence |
| 293 | 6271-OT14 off-target sequence |
| 294 | 6271-OT15 off-target sequence |
| 295 | 6271-OT16 off-target sequence |
| 296 | 6271-OT17 off-target sequence |
| 297 | 6271-OT18 off-target sequence |
| 298 | 6271-OT19 off-target sequence |
| 299 | 6271-OT20 off-target sequence |
| 300 | 6271-OT21 off-target sequence |
| 301 | 6271-OT22 off-target sequence |
| 302 | 6271-OT23 off-target sequence |
| 303 | 6271-OT24 off-target sequence |
| 304 | 6271-OT25 off-target sequence |
| 305 | 6271-OT26 off-target sequence |
| 306 | 6271-OT27 off-target sequence |
| 307 | 6271-OT28 off-target sequence |
| 308 | 6271-OT29 off-target sequence |
| 309 | 6271-OT30 off-target sequence |
| 310 | 6272-OT1 off-target sequence |
| 311 | 6272-OT2 off-target sequence |
| 312 | 6272-OT3 off-target sequence |
| 313 | 6272-OT4 off-target sequence |
| 314 | 6272-OT5 off-target sequence |
| 315 | 6272-OT6 off-target sequence |
| 316 | 6272-OT7 off-target sequence |
| 317 | 6272-OT8 off-target sequence |
| 318 | 6272-OT9 off-target sequence |
| 319 | 6272-OT10 off-target sequence |
| 320 | 6272-OT11 off-target sequence |
| 321 | 6272-OT12 off-target sequence |
| 322 | 6272-OT13 off-target sequence |
| 323 | 6272-OT14 off-target sequence |
| 324 | 6272-OT15 off-target sequence |
| 325 | 6272-OT16 off-target sequence |
| 326 | 6272-OT17 off-target sequence |
| 327 | 6272-OT18 off-target sequence |
| 328 | 6272-OT19 off-target sequence |
| 329 | 5637-OT1 left primer sequence |
| 330 | 5637-OT2 left primer sequence |
| 331 | 5637-OT3 left primer sequence |
| 332 | 5637-OT4 left primer sequence |
| 333 | 5637-OT5 left primer sequence |
| 334 | 5637-OT6 left primer sequence |
| 335 | 5637-OT7 left primer sequence |
| 336 | 5637-OT8 left primer sequence |
| 337 | 5637-OT9 left primer sequence |
| 338 | 5637-OT10 left primer sequence |
| 339 | 5637-OT11 left primer sequence |
| 340 | 5637-OT12 left primer sequence |
| 341 | 5637-OT13 left primer sequence |
| 342 | 5637-OT14 left primer sequence |
| 343 | 5637-OT15 left primer sequence |
| 344 | 5637-OT16 left primer sequence |
| 345 | 5637-OT17 left primer sequence |
| 346 | 5637-OT18 left primer sequence |
| 347 | 5637-OT19 left primer sequence |
| 348 | 5637-OT20 left primer sequence |
| 349 | 5637-OT21 left primer sequence |
| 350 | 5637-OT22 left primer sequence |
| 351 | 5637-OT23 left primer sequence |
| 352 | 5637-OT24 left primer sequence |
| 353 | 5637-OT25 left primer sequence |
| 354 | 5637-OT26 left primer sequence |
| 355 | 5637-OT27 left primer sequence |
| 356 | 5637-OT28 left primer sequence |
| 357 | 5637-OT29 left primer sequence |
| 358 | 5637-OT30 left primer sequence |
| 359 | 5637-OT31 left primer sequence |
| 360 | 5637-OT32 left primer sequence |
| 361 | 5637-OT33 left primer sequence |
| 362 | 5637-OT34 left primer sequence |
| 363 | 5637-OT35 left primer sequence |
| 364 | 5637-OT36 left primer sequence |
| 365 | 5637-OT37 left primer sequence |
| 366 | 5641-OT1 left primer sequence |
| 367 | 5641-OT2 left primer sequence |
| 368 | 5641-OT3 left primer sequence |
| 369 | 5641-OT4 left primer sequence |
| 370 | 5641-OT5 left primer sequence |
| 371 | 5641-OT6 left primer sequence |
| 372 | 5641-OT7 left primer sequence |
| 373 | 5641-OT8 left primer sequence |
| 374 | 5641-OT9 left primer sequence |
| 375 | 5641-OT10 left primer sequence |
| 376 | 5641-OT11 left primer sequence |
| 377 | 5641-OT12 left primer sequence |
| 378 | 5641-OT13 left primer sequence |
| 379 | 5641-OT14 left primer sequence |
| 380 | 5641-OT15 left primer sequence |
| 381 | 5649-OT1 left primer sequence |
| 382 | 5707-OT1 left primer sequence |
| 383 | 5707-OT2 left primer sequence |
| 384 | 5707-OT3 left primer sequence |
| 385 | 5707-OT4 left primer sequence |
| 386 | 5707-OT5 left primer sequence |
| 387 | 5707-OT6 left primer sequence |
| 388 | 6271-OT1 left primer sequence |
| 389 | 6271-OT2 left primer sequence |
| 390 | 6271-OT3 left primer sequence |
| 391 | 6271-OT4 left primer sequence |
| 392 | 6271-OT5 left primer sequence |
| 393 | 6271-OT6 left primer sequence |
| 394 | 6271-OT7 left primer sequence |
| 395 | 6271-OT8 left primer sequence |
| 396 | 6271-OT9 left primer sequence |
| 397 | 6271-OT10 left primer sequence |
| 398 | 6271-OT11 left primer sequence |
| 399 | 6271-OT12 left primer sequence |
| 400 | 6271-OT13 left primer sequence |
| 401 | 6271-OT14 left primer sequence |
| 402 | 6271-OT15 left primer sequence |
| 403 | 6271-OT16 left primer sequence |
| 404 | 6271-OT17 left primer sequence |
| 405 | 6271-OT18 left primer sequence |
| 406 | 6271-OT19 left primer sequence |
| 407 | 6271-OT20 left primer sequence |
| 408 | 6271-OT21 left primer sequence |
| 409 | 6271-OT22 left primer sequence |
| 410 | 6271-OT23 left primer sequence |
| 411 | 6271-OT24 left primer sequence |
| 412 | 6271-OT25 left primer sequence |
| 413 | 6271-OT26 left primer sequence |
| 414 | 6271-OT27 left primer sequence |
| 415 | 6271-OT28 left primer sequence |
| 416 | 6271-OT29 left primer sequence |
| 417 | 6271-OT30 left primer sequence |
| 418 | 6272-OT1 left primer sequence |
| 419 | 6272-OT2 left primer sequence |
| 420 | 6272-OT3 left primer sequence |
| 421 | 6272-OT4 left primer sequence |
| 422 | 6272-OT5 left primer sequence |
| 423 | 6272-OT6 left primer sequence |
| 424 | 6272-OT7 left primer sequence |
| 425 | 6272-OT8 left primer sequence |
| 426 | 6272-OT9 left primer sequence |
| 427 | 6272-OT10 left primer sequence |
| 428 | 6272-OT11 left primer sequence |
| 429 | 6272-OT12 left primer sequence |
| 430 | 6272-OT13 left primer sequence |
| 431 | 6272-OT14 left primer sequence |
| 432 | 6272-OT15 left primer sequence |
| 433 | 6272-OT16 left primer sequence |
| 434 | 6272-OT17 left primer sequence |
| 435 | 6272-OT18 left primer sequence |
| 436 | 6272-OT19 left primer sequence |
| 437 | 5637-OT1 right primer sequence |
| 438 | 5637-OT2 right primer sequence |
| 439 | 5637-OT3 right primer sequence |
| 440 | 5637-OT4 right primer sequence |
| 441 | 5637-OT5 right primer sequence |
| 442 | 5637-OT6 right primer sequence |
| 443 | 5637-OT7 right primer sequence |
| 444 | 5637-OT8 right primer sequence |
| 445 | 5637-OT9 right primer sequence |
| 446 | 5637-OT10 right primer sequence |
| 447 | 5637-OT11 right primer sequence |
| 448 | 5637-OT12 right primer sequence |
| 449 | 5637-OT13 right primer sequence |
| 450 | 5637-OT14 right primer sequence |
| 451 | 5637-OT15 right primer sequence |
| 452 | 5637-OT16 right primer sequence |
| 453 | 5637-OT17 right primer sequence |
| 454 | 5637-OT18 right primer sequence |
| 455 | 5637-OT19 right primer sequence |
| 456 | 5637-OT20 right primer sequence |
| 457 | 5637-OT21 right primer sequence |
| 458 | 5637-OT22 right primer sequence |
| 459 | 5637-OT23 right primer sequence |
| 460 | 5637-OT24 right primer sequence |
| 461 | 5637-OT25 right primer sequence |
| 462 | 5637-OT26 right primer sequence |
| 463 | 5637-OT27 right primer sequence |
| 464 | 5637-OT28 right primer sequence |
| 465 | 5637-OT29 right primer sequence |
| 466 | 5637-OT30 right primer sequence |
| 467 | 5637-OT31 right primer sequence |
| 468 | 5637-OT32 right primer sequence |
| 469 | 5637-OT33 right primer sequence |
| 470 | 5637-OT34 right primer sequence |
| 471 | 5637-OT35 right primer sequence |
| 472 | 5637-OT36 right primer sequence |
| 473 | 5637-OT37 right primer sequence |
| 474 | 5641-OT1 right primer sequence |
| 475 | 5641-OT2 right primer sequence |
| 476 | 5641-OT3 right primer sequence |
| 477 | 5641-OT4 right primer sequence |
| 478 | 5641-OT5 right primer sequence |
| 479 | 5641-OT6 right primer sequence |
| 480 | 5641-OT7 right primer sequence |
| 481 | 5641-OT8 right primer sequence |
| 482 | 5641-OT9 right primer sequence |
| 483 | 5641-OT10 right primer sequence |
| 484 | 5641-OT11 right primer sequence |
| 485 | 5641-OT12 right primer sequence |
| 486 | 5641-OT13 right primer sequence |
| 487 | 5641-OT14 right primer sequence |
| 488 | 5641-OT15 right primer sequence |
| 489 | 5649-OT1 right primer sequence |
| 490 | 5707-OT1 right primer sequence |
| 491 | 5707-OT2 right primer sequence |
| 492 | 5707-OT3 right primer sequence |
| 493 | 5707-OT4 right primer sequence |
| 494 | 5707-OT5 right primer sequence |
| 495 | 5707-OT6 right primer sequence |
| 496 | 6271-OT1 right primer sequence |
| 497 | 6271-OT2 right primer sequence |
| 498 | 6271-OT3 right primer sequence |
| 499 | 6271-OT4 right primer sequence |
| 500 | 6271-OT5 right primer sequence |
| 501 | 6271-OT6 right primer sequence |
| 502 | 6271-OT7 right primer sequence |
| 503 | 6271-OT8 right primer sequence |
| 504 | 6271-OT9 right primer sequence |
| 505 | 6271-OT10 right primer sequence |
| 506 | 6271-OT11 right primer sequence |
| 507 | 6271-OT12 right primer sequence |
| 508 | 6271-OT13 right primer sequence |
| 509 | 6271-OT14 right primer sequence |
| 510 | 6271-OT15 right primer sequence |
| 511 | 6271-OT16 right primer sequence |
| 512 | 6271-OT17 right primer sequence |
| 513 | 6271-OT18 right primer sequence |
| 514 | 6271-OT19 right primer sequence |
| 515 | 6271-OT20 right primer sequence |
| 516 | 6271-OT21 right primer sequence |
| 517 | 6271-OT22 right primer sequence |
| 518 | 6271-OT23 right primer sequence |
| 519 | 6271-OT24 right primer sequence |
| 520 | 6271-OT25 right primer sequence |
| 521 | 6271-OT26 right primer sequence |
| 522 | 6271-OT27 right primer sequence |
| 523 | 6271-OT28 right primer sequence |
| 524 | 6271-OT29 right primer sequence |
| 525 | 6271-OT30 right primer sequence |
| 526 | 6272-OT1 right primer sequence |
| 527 | 6272-OT2 right primer sequence |
| 528 | 6272-OT3 right primer sequence |
| 529 | 6272-OT4 right primer sequence |
| 530 | 6272-OT5 right primer sequence |
| 531 | 6272-OT6 right primer sequence |
| 532 | 6272-OT7 right primer sequence |
| 533 | 6272-OT8 right primer sequence |
| 534 | 6272-OT9 right primer sequence |
| 535 | 6272-OT10 right primer sequence |
| 536 | 6272-OT11 right primer sequence |
| 537 | 6272-OT12 right primer sequence |
| 538 | 6272-OT13 right primer sequence |
| 539 | 6272-OT14 right primer sequence |
| 540 | 6272-OT15 right primer sequence |
| 541 | 6272-OT16 right primer sequence |
| 542 | 6272-OT17 right primer sequence |
| 543 | 6272-OT18 right primer sequence |
| 544 | 6272-OT19 right primer sequence |
| 545 | APG07433.1 RGN |
| 546 | APG07433.1 crRNA repeat |
| 547 | APG07433.1 tracrRNA |
| 548 | APG07433.1 coding sequence, mammalian |
| | codon optimized |
| 549 | APG07433.1 crRNA repeat truncated by 5 |
| | nt at 3′ end |
| 550 | APG07433.1 crRNA repeat truncated by 6 |
| | nt at 3′ end |
| 551 | APG07433.1 crRNA repeat truncated by 7 |
| | nt at 3′ end |
| 552 | APG07433.1 crRNA repeat truncated by 8 |
| | nt at 3′ end |
| 553 | APG07433.1 tracrRNA truncated by |
| | 5 nt at 5′ end, -4 tail, -2SL3 |
| 554 | APG07433.1 tracrRNA truncated by |
| | 6 nt at 5′ end (98 bb) |
| 555 | APG07433.1 tracrRNA 98bb_-6 tail |
| 556 | APG07433.1 tracrRNA 98bb_-6 |
| | tail_-2SL3 |
| 557 | APG07433.1 tracrRNA truncated by |
| | 7 nt at 5′ end (96 bb) |
| 558 | APG07433.1 tracrRNA 96bb_-6 tail |
| 559 | APG07433.1 tracrRNA 96bb_-6 |
| | tail_-2SL3 |
| 560 | APG07433.1 tracrRNA truncated by |
| | 8 nt at 5′ end (94 bb) |
| 561 | APG07433.1 tracrRNA 94bb_-6 tail |
| 562 | APG07433.1 tracrRNA 94bb_-6tail-2SL3 |
| 563 | APG07433.1 M backbone |
| 564 | APG07433.1 98 bb backbone |
| 565 | APG07433.1 98bb_-6 tail backbone |
| 566 | APG07433.1 98bb_-6 tail_-2SL3 backbone |
| 567 | APG07433.1 96 bb backbone |
| 568 | APG07433.1 96bb_-6 tail backbone |
| 569 | APG07433.1 96bb_-6 tail_-2SL3 backbone |
| 570 | APG07433.1 94 bb backbone |
| 571 | APG07433.1 94bb_-6 tail backbone |
| 572 | APG07433.1 94bb_-6tail-2SL3 backbone |
| 573 | APG07433.1 backbone |
| 574 | SGN005637 crRNA |
| 575 | SGN005641 crRNA |
| 576 | SGN005649 crRNA |
| 577 | SGN005707 crRNA |
| 578 | SGN006271 crRNA |
| 579 | SGN006272 crRNA |
| 580 | SGN002770 crRNA |
| 581 | SGN002771 crRNA |
| 582 | SGN002772 crRNA |
| 583 | SGN002773 crRNA |
| 584 | SGN002774 crRNA |
| 585 | SGN002775 crRNA |
| 586 | SGN002776 crRNA |
| 587 | SGN002777 crRNA |
| 588 | SGN002778 crRNA |
| 589 | SGN002779 crRNA |
| 590 | SGN002780 crRNA |
| 591 | SGN002781 crRNA |
| 592 | SGN002782 crRNA |
| 593 | SGN002783 crRNA |
| 594 | SGN002784 crRNA |
| 595 | SGN002785 crRNA |
| 596 | SGN002786 crRNA |
| 597 | SGN002787 crRNA |
| 598 | SGN002788 crRNA |
| 599 | SGN002789 crRNA |
| 600 | SGN002790 crRNA |
| 601 | SGN002791 crRNA |
| 602 | SGN002792 crRNA |
| 603 | SGN002793 crRNA |
| 604 | SGN002794 crRNA |
| 605 | SGN002795 crRNA |
| 606 | SGN002796 crRNA |
| 607 | SGN002797 crRNA |
| 608 | SGN002798 crRNA |
| 609 | SGN002799 crRNA |
| 610 | SGN002800 crRNA |
| 611 | SGN002801 crRNA |
| 612 | SGN002802 crRNA |
| 613 | SGN002803 crRNA |
| 614 | SGN003378 crRNA |
| 615 | SGN003379 crRNA |
| 616 | SGN003380 crRNA |
| 617 | SGN003381 crRNA |
| 618 | SGN003382 crRNA |
| 619 | SGN003383 crRNA |
| 620 | SGN003384 crRNA |
| 621 | SGN005042 crRNA |
| 622 | SGN005043 crRNA |
| 623 | SGN005044 crRNA |
| 624 | SGN005050 crRNA |
| 625 | SGN005051 crRNA |
| 626 | SGN005052 crRNA |
| 627 | SGN005053 crRNA |
| 628 | SGN005054 crRNA |
| 629 | SGN005055 crRNA |
| 630 | SGN005056 crRNA |
| 631 | SGN005057 crRNA |
| 632 | SGN005058 crRNA |
| 633 | SGN005059 crRNA |
| 634 | SGN005060 crRNA |
| 635 | SGN005061 crRNA |
| 636 | SGN005062 crRNA |
| 637 | SGN005063 crRNA |
| 638 | SGN005064 crRNA |
| 639 | SGN005065 crRNA |
| 640 | SGN005066 crRNA |
| 641 | SGN005067 crRNA |
| 642 | SGN005068 crRNA |
| 643 | SGN005069 crRNA |
| 644 | SGN005070 crRNA |
| 645 | SGN005071 crRNA |
| 646 | SGN005072 crRNA |
| 647 | SGN005073 crRNA |
| 648 | SGN005074 crRNA |
| 649 | SGN005075 crRNA |
| 650 | SGN005076 crRNA |
| 651 | SGN005077 crRNA |
| 652 | SGN005078 crRNA |
| 653 | SGN005079 crRNA |
| 654 | SGN005104 crRNA |
| 655 | SGN005635 crRNA |
| 656 | SGN005636 crRNA |
| 657 | SGN005638 crRNA |
| 658 | SGN005639 crRNA |
| 659 | SGN005640 crRNA |
| 660 | SGN005642 crRNA |
| 661 | SGN005643 crRNA |
| 662 | SGN005644 crRNA |
| 663 | SGN005645 crRNA |
| 664 | SGN005646 crRNA |
| 665 | SGN005647 crRNA |
| 666 | SGN005648 crRNA |
| 667 | SGN005650 crRNA |
| 668 | SGN005651 crRNA |
| 669 | SGN005683 SGN005684 SGN005685 crRNAs |
| 670 | SGN005686 SGN005687 SGN005688 crRNAs |
| 671 | SGN005689 SGN005690 SGN005691 crRNAs |
| 672 | SGN005692 SGN005693 SGN005694 crRNAs |
| 673 | SGN005695 SGN005696 SGN005697 crRNAs |
| 674 | SGN005698 SGN005699 SGN005700 crRNAs |
| 675 | SGN005701 SGN005702 SGN005703 crRNAs |
| 676 | SGN005704 SGN005705 SGN005706 crRNAs |
| 677 | SGN005708 SGN005709 crRNAs |
| 678 | SGN005710 SGN005711 SGN005712 crRNAs |
| 679 | SGN005713 SGN005714 SGN005715 crRNAs |
| 680 | SGN005716 SGN005717 SGN005718 crRNAs |
| 681 | SGN006269 crRNA |
| 682 | SGN006270 crRNA |
| 683 | SGN006273 crRNA |
| 684 | SGN006274 crRNA |
| 685 | SGN006275 crRNA |
| 686 | SGN006276 crRNA |
| 687 | SGN006277 crRNA |
| 688 | SGN006278 crRNA |
| 689 | SGN006279 crRNA |
| 690 | SGN006280 crRNA |
| 691 | SGN006281 crRNA |
| 692 | SGN006282 crRNA |
| 693 | SGN005637 guide RNA |
| 694 | SGN005641 guide RNA |
| 695 | SGN005649 guide RNA |
| 696 | SGN005707 guide RNA |
| 697 | SGN006271 guide RNA |
| 698 | SGN006272 guide RNA |
| 699 | SGN002770 guide RNA |
| 700 | SGN002771 guide RNA |
| 701 | SGN002772 guide RNA |
| 702 | SGN002773 guide RNA |
| 703 | SGN002774 guide RNA |
| 704 | SGN002775 guide RNA |
| 705 | SGN002776 guide RNA |
| 706 | SGN002777 guide RNA |
| 707 | SGN002778 guide RNA |
| 708 | SGN002779 guide RNA |
| 709 | SGN002780 guide RNA |
| 710 | SGN002781 guide RNA |
| 711 | SGN002782 guide RNA |
| 712 | SGN002783 guide RNA |
| 713 | SGN002784 guide RNA |
| 714 | SGN002785 guide RNA |
| 715 | SGN002786 guide RNA |
| 716 | SGN002787 guide RNA |
| 717 | SGN002788 guide RNA |
| 718 | SGN002789 guide RNA |
| 719 | SGN002790 guide RNA |
| 720 | SGN002791 guide RNA |
| 721 | SGN002792 guide RNA |
| 722 | SGN002793 guide RNA |
| 723 | SGN002794 guide RNA |
| 724 | SGN002795 guide RNA |
| 725 | SGN002796 guide RNA |
| 726 | SGN002797 guide RNA |
| 727 | SGN002798 guide RNA |
| 728 | SGN002799 guide RNA |
| 729 | SGN002800 guide RNA |
| 730 | SGN002801 guide RNA |
| 731 | SGN002802 guide RNA |
| 732 | SGN002803 guide RNA |
| 733 | SGN003378 guide RNA |
| 734 | SGN003379 guide RNA |
| 735 | SGN003380 guide RNA |
| 736 | SGN003381 guide RNA |
| 737 | SGN003382 guide RNA |
| 738 | SGN003383 guide RNA |
| 739 | SGN003384 guide RNA |
| 740 | SGN005042 guide RNA |
| 741 | SGN005043 guide RNA |
| 742 | SGN005044 guide RNA |
| 743 | SGN005050 guide RNA |
| 744 | SGN005051 guide RNA |
| 745 | SGN005052 guide RNA |
| 746 | SGN005053 guide RNA |
| 747 | SGN005054 guide RNA |
| 748 | SGN005055 guide RNA |
| 749 | SGN005056 guide RNA |
| 750 | SGN005057 guide RNA |
| 751 | SGN005058 guide RNA |
| 752 | SGN005059 guide RNA |
| 753 | SGN005060 guide RNA |
| 754 | SGN005061 guide RNA |
| 755 | SGN005062 guide RNA |
| 756 | SGN005063 guide RNA |
| 757 | SGN005064 guide RNA |
| 758 | SGN005065 guide RNA |
| 759 | SGN005066 guide RNA |
| 760 | SGN005067 guide RNA |
| 761 | SGN005068 guide RNA |
| 762 | SGN005069 guide RNA |
| 763 | SGN005070 guide RNA |
| 764 | SGN005071 guide RNA |
| 765 | SGN005072 guide RNA |
| 766 | SGN005073 guide RNA |
| 767 | SGN005074 guide RNA |
| 768 | SGN005075 guide RNA |
| 769 | SGN005076 guide RNA |
| 770 | SGN005077 guide RNA |
| 771 | SGN005078 guide RNA |
| 772 | SGN005079 guide RNA |
| 773 | SGN005104 guide RNA |
| 774 | SGN005635 guide RNA |
| 775 | SGN005636 guide RNA |
| 776 | SGN005638 guide RNA |
| 777 | SGN005639 guide RNA |
| 778 | SGN005640 guide RNA |
| 779 | SGN005642 guide RNA |
| 780 | SGN005643 guide RNA |
| 781 | SGN005644 guide RNA |
| 782 | SGN005645 guide RNA |
| 783 | SGN005646 guide RNA |
| 784 | SGN005647 guide RNA |
| 785 | SGN005648 guide RNA |
| 786 | SGN005650 guide RNA |
| 787 | SGN005651 guide RNA |
| 788 | SGN005683 guide RNA |
| 789 | SGN005684 guide RNA |
| 790 | SGN005685 guide RNA |
| 791 | SGN005686 guide RNA |
| 792 | SGN005687 guide RNA |
| 793 | SGN005688 guide RNA |
| 794 | SGN005689 guide RNA |
| 795 | SGN005690 guide RNA |
| 796 | SGN005691 guide RNA |
| 797 | SGN005692 guide RNA |
| 798 | SGN005693 guide RNA |
| 799 | SGN005694 guide RNA |
| 800 | SGN005695 guide RNA |
| 801 | SGN005696 guide RNA |
| 802 | SGN005697 guide RNA |
| 803 | SGN005698 guide RNA |
| 804 | SGN005699 guide RNA |
| 805 | SGN005700 guide RNA |
| 806 | SGN005701 guide RNA |
| 807 | SGN005702 guide RNA |
| 808 | SGN005703 guide RNA |
| 809 | SGN005704 guide RNA |
| 810 | SGN005705 guide RNA |
| 811 | SGN005706 guide RNA |
| 812 | SGN005708 guide RNA |
| 813 | SGN005709 guide RNA |
| 814 | SGN005710 guide RNA |
| 815 | SGN005711 guide RNA |
| 816 | SGN005712 guide RNA |
| 817 | SGN005713 guide RNA |
| 818 | SGN005714 guide RNA |
| 819 | SGN005715 guide RNA |
| 820 | SGN005716 guide RNA |
| 821 | SGN005717 guide RNA |
| 822 | SGN005718 guide RNA |
| 823 | SGN006269 guide RNA |
| 824 | SGN006270 guide RNA |
| 825 | SGN006273 guide RNA |
| 826 | SGN006274 guide RNA |
| 827 | SGN006275 guide RNA |
| 828 | SGN006276 guide RNA |
| 829 | SGN006277 guide RNA |
| 830 | SGN006278 guide RNA |
| 831 | SGN006279 guide RNA |
| 832 | SGN006280 guide RNA |
| 833 | SGN006281 guide RNA |
| 834 | SGN006282 guide RNA |
| 835 | Streptococcus pyogenes Cas9 |
| 836 | Streptococcus pyogenes |
| | Cas9 D10A nickase |
| 837 | Neisseria meningitidis Cas9 (Nme2Cas9) |
| 838 | APG05083.1 RGN |
| 839 | APG05083.1 crRNA repeat |
| 840 | APG05083.1 tracrRNA |
| 841 | APG07513.1 RGN |
| 842 | APG07513.1 crRNA repeat |
| 843 | APG07513.1 tracrRNA |
| 844 | APG08290.1 RGN |
| 845 | APG08290.1 crRNA repeat sequence |
| 846 | APG08290.1 tracrRNA |
| 847 | APG05459.1 RGN |
| 848 | APG05459.1 crRNA repeat |
| 849 | APG05459.1 tracrRNA |
| 850 | APG01688.1 RGN |
| 851 | APG01688.1 crRNA repeat |
| 852 | APG01688.1 tracrRNA |
| 853 | APG03128 RGN |
| 854 | APG03128 crRNA repeat |
| 855 | APG03128 tracrRNA |
| 856 | APG05733.1 RGN |
| 857 | APG05733.1 crRNA repeat |
| 858 | APG05733.1 tracrRNA |
| 859 | APG01658.1 RGN |
| 860 | APG01658.1 crRNA repeat |
| 861 | APG01658.1 tracrRNA |
| 862 | APG06498.1 RGN |
| 863 | APG06498.1 crRNA repeat |
| 864 | APG06498.1 tracrRNA |
| 865 | APG06877.1 RGN |
| 866 | APG06877.1 crRNA repeat |
| 867 | APG06877.1 tracrRNA |
| 868 | APG09053.1 RGN |
| 869 | APG09053.1 crRNA repeat |
| 870 | APG09053.1 tracrRNA |
| 871 | APG04293.1 RGN |
| 872 | APG04293.1 crRNA repeat |
| 873 | APG04293.1 tracrRNA |
| 874 | APG06646.1 RGN |
| 875 | APG06646.1 crRNA repeat |
| 876 | APG06646.1 tracrRNA |
| 877 | APG02874 RGN |
| 878 | APG02874 crRNA repeat |
| 879 | APG02874 tracrRNA |
| 880 | APG03031 RGN |
| 881 | APG03031 crRNA repeat |
| 882 | APG03031 tracrRNA |
| 883 | APG09208 RGN |
| 884 | APG09208 crRNA repeat |
| 885 | APG09208 tracrRNA |
| 886 | APG09344 RGN |
| 887 | APG09344 crRNA repeat |
| 888 | APG09344 tracrRNA |
| 889 | APG07991 RGN |
| 890 | APG07991 crRNA repeat |
| 891 | APG07991 tracrRNA |
| 892 | APG01868 RGN |
| 893 | APG01868 crRNA repeat |
| 894 | APG01868 tracrRNA |
| 895 | APG02998 RGN |
| 896 | APG02998 crRNA repeat |
| 897 | APG02998 tracrRNA |
| 898 | APG07433.1 deletion variant RGN |
| 899 | APG08290.1 deletion variant RGN |
| 900 | LPG10134 RGN |
| 901 | LPG10134 crRNA repeat |
| 902 | LPG10134 tracrRNA |
| 903 | LPG10136 RGN |
| 904 | LPG10136 crRNA repeat |
| 905 | LPG10136 tracrRNA |
| 906 | LPG10138 RGN |
| 907 | LPG10138 crRNA repeat |
| 908 | LPG10138 tracrRNA |
| 909 | LPG10139 RGN |
| 910 | LPG10139 crRNA repeat |
| 911 | LPG10139 tracrRNA |
| 912 | LPG10141 RGN |
| 913 | LPG10141 crRNA repeat |
| 914 | LPG10141 tracrRNA |
| 915 | LPG10145 RGN |
| 916 | LPG10145 crRNA repeat |
| 917 | LPG10145 tracrRNA |
| 918 | SpyCas9 crRNA repeat |
| 919 | SpyCas9 tracrRNA |
| 920 | SpyCas9 sgRNA |
| 921 | Conserved amino acid motif in a meganuclease |
| 922 | SV40 nuclear localization signal |
| 923 | nucleoplasmin nuclear localization signal |
| 924 | Human U6 promoter |
| 925 | NC_041760 promoter |
| 926 | NW_004848155 promoter |
| 927 | LR738627 promoter |
| 928 | NC_044556 promoter |
| 929 | XM_030845548 promoter |
| 930 | Mini NC_041760 promoter |
| 931 | Mini NW_004848155 promoter |
| 932 | Mini LR738627 promoter |
| 933 | Mini NC_044556 promoter |
| 934 | Mini XM_030845548 promoter |
| 935 | CSB/ERCC6, a member of a nucleotide excision repair |
| | (NER) pathway |
| 936 | 3xFLAG tag |
| 937 | Homo sapiens FOXP3 protein (isoform a; NCBI |
| | Reference Sequence NP_054728.2) |
| 938 | Homo sapiens FOXP3 protein (isoform b; NCBI |
| | Reference Sequence NP_001107849.1) |
| 939 | Homo sapiens FOXP3 gene |
| 940 | MS modified APG07433.1 crRNA repeat |
| 941 | MS modified APG07433.1 tracrRNA |
| 942 | MS modified APG07433.1 crRNA repeat truncated by |
| | 5 nt at 3′ end |
| 943 | MS modified APG07433.1 crRNA repeat truncated by |
| | 6 nt at 3′ end |
| 944 | MS modified APG07433.1 crRNA repeat truncated by |
| | 7 nt at 3′ end |
| 945 | MS modified APG07433.1 crRNA repeat truncated by |
| | 8 nt at 3′ end |
| 946 | MS modified APG07433.1 tracrRNA truncated by 5 nt |
| | at 5′ end, -4 tail, -2SL3 |
| 947 | MS modified APG07433.1 tracrRNA truncated by 6 nt |
| | at 5′ end (98 bb) |
| 948 | MS modified APG07433.1 tracrRNA 98bb_-6 tail |
| 949 | MS modified APG07433.1 tracrRNA 98bb_- 6 tail_-2SL3 |
| 950 | MS modified APG07433.1 tracrRNA truncated by 7 nt |
| | at 5′ end (96 bb) |
| 951 | MS modified APG07433.1 tracrRNA 96bb_-6 tail |
| 952 | MS modified APG07433.1 tracrRNA 96bb_- 6 tail_-2SL3 |
| 953 | MS modified APG07433.1 tracrRNA truncated by 8 nt |
| | at 5′ end (94 bb) |
| 954 | MS modified APG07433.1 tracrRNA 94bb_-6 tail |
| 955 | MS modified APG07433.1 tracrRNA 94bb_-6tail-2SL3 |
| 956 | MS modified APG07433.1 M backbone |
| 957 | MS modified APG07433.1 98 bb backbone |
| 958 | MS modified APG07433.1 98bb_-6 tail backbone |
| 959 | MS modified APG07433.1 98bb_-6 tail_-2SL3 |
| | backbone |
| 960 | MS modified APG07433.1 96 bb backbone |
| 961 | MS modified APG07433.1 96bb_-6 tail backbone |
| 962 | MS modified APG07433.1 96bb_-6 tail_-2SL3 |
| | backbone |
| 963 | MS modified APG07433.1 94 bb backbone |
| 964 | MS modified APG07433.1 94bb_-6 tail backbone |
| 965 | MS modified APG07433.1 94bb_-6tail-2SL3 backbone |
| 966 | MS modified APG07433.1 backbone |
| 967 | MS modified SGN005637 crRNA |
| 968 | MS modified SGN005641 crRNA |
| 969 | MS modified SGN005649 crRNA |
| 970 | MS modified SGN005707 crRNA |
| 971 | MS modified SGN006271 crRNA |
| 972 | MS modified SGN006272 crRNA |
| 973 | MS modified SGN002770 crRNA |
| 974 | MS modified SGN002771 crRNA |
| 975 | MS modified SGN002772 crRNA |
| 976 | MS modified SGN002773 crRNA |
| 977 | MS modified SGN002774 crRNA |
| 978 | MS modified SGN002775 crRNA |
| 979 | MS modified SGN002776 crRNA |
| 980 | MS modified SGN002777 crRNA |
| 981 | MS modified SGN002778 crRNA |
| 982 | MS modified SGN002779 crRNA |
| 983 | MS modified SGN002780 crRNA |
| 984 | MS modified SGN002781 crRNA |
| 985 | MS modified SGN002782 crRNA |
| 986 | MS modified SGN002783 crRNA |
| 987 | MS modified SGN002784 crRNA |
| 988 | MS modified SGN002785 crRNA |
| 989 | MS modified SGN002786 crRNA |
| 990 | MS modified SGN002787 crRNA |
| 991 | MS modified SGN002788 crRNA |
| 992 | MS modified SGN002789 crRNA |
| 993 | MS modified SGN002790 crRNA |
| 994 | MS modified SGN002791 crRNA |
| 995 | MS modified SGN002792 crRNA |
| 996 | MS modified SGN002793 crRNA |
| 997 | MS modified SGN002794 crRNA |
| 998 | MS modified SGN002795 crRNA |
| 999 | MS modified SGN002796 crRNA |
| 1000 | MS modified SGN002797 crRNA |
| 1001 | MS modified SGN002798 crRNA |
| 1002 | MS modified SGN002799 crRNA |
| 1003 | MS modified SGN002800 crRNA |
| 1004 | MS modified SGN002801 crRNA |
| 1005 | MS modified SGN002802 crRNA |
| 1006 | MS modified SGN002803 crRNA |
| 1007 | MS modified SGN003378 crRNA |
| 1008 | MS modified SGN003379 crRNA |
| 1009 | MS modified SGN003380 crRNA |
| 1010 | MS modified SGN003381 crRNA |
| 1011 | MS modified SGN003382 crRNA |
| 1012 | MS modified SGN003383 crRNA |
| 1013 | MS modified SGN003384 crRNA |
| 1014 | MS modified SGN005042 crRNA |
| 1015 | MS modified SGN005043 crRNA |
| 1016 | MS modified SGN005044 crRNA |
| 1017 | MS modified SGN005050 crRNA |
| 1018 | MS modified SGN005051 crRNA |
| 1019 | MS modified SGN005052 crRNA |
| 1020 | MS modified SGN005053 crRNA |
| 1021 | MS modified SGN005054 crRNA |
| 1022 | MS modified SGN005055 crRNA |
| 1023 | MS modified SGN005056 crRNA |
| 1024 | MS modified SGN005057 crRNA |
| 1025 | MS modified SGN005058 crRNA |
| 1026 | MS modified SGN005059 crRNA |
| 1027 | MS modified SGN005060 crRNA |
| 1028 | MS modified SGN005061 crRNA |
| 1029 | MS modified SGN005062 crRNA |
| 1030 | MS modified SGN005063 crRNA |
| 1031 | MS modified SGN005064 crRNA |
| 1032 | MS modified SGN005065 crRNA |
| 1033 | MS modified SGN005066 crRNA |
| 1034 | MS modified SGN005067 crRNA |
| 1035 | MS modified SGN005068 crRNA |
| 1036 | MS modified SGN005069 crRNA |
| 1037 | MS modified SGN005070 crRNA |
| 1038 | MS modified SGN005071 crRNA |
| 1039 | MS modified SGN005072 crRNA |
| 1040 | MS modified SGN005073 crRNA |
| 1041 | MS modified SGN005074 crRNA |
| 1042 | MS modified SGN005075 crRNA |
| 1043 | MS modified SGN005076 CrRNA |
| 1044 | MS modified SGN005077 crRNA |
| 1045 | MS modified SGN005078 crRNA |
| 1046 | MS modified SGN005079 crRNA |
| 1047 | MS modified SGN005104 crRNA |
| 1048 | MS modified SGN005635 crRNA |
| 1049 | MS modified SGN005636 crRNA |
| 1050 | MS modified SGN005638 crRNA |
| 1051 | MS modified SGN005639 crRNA |
| 1052 | MS modified SGN005640 crRNA |
| 1053 | MS modified SGN005642 crRNA |
| 1054 | MS modified SGN005643 crRNA |
| 1055 | MS modified SGN005644 crRNA |
| 1056 | MS modified SGN005645 crRNA |
| 1057 | MS modified SGN005646 crRNA |
| 1058 | MS modified SGN005647 crRNA |
| 1059 | MS modified SGN005648 crRNA |
| 1060 | MS modified SGN005650 crRNA |
| 1061 | MS modified SGN005651 crRNA |
| 1062 | SGN005683 SGN005684 |
| | SGN005685 MS modified crRNAs |
| 1063 | SGN005686 SGN005687 |
| | SGN005688 MS modified crRNAs |
| 1064 | SGN005689 SGN005690 |
| | SGN005691 MS modified crRNAs |
| 1065 | SGN005692 SGN005693 |
| | SGN005694 MS modified crRNAs |
| 1066 | SGN005695 SGN005696 |
| | SGN005697 MS modified crRNAs |
| 1067 | SGN005698 SGN005699 |
| | SGN005700 MS modified crRNAs |
| 1068 | SGN005701 SGN005702 |
| | SGN005703 MS modified crRNAs |
| 1069 | SGN005704 SGN005705 |
| | SGN005706 MS modified crRNAs |
| 1070 | SGN005708 SGN005709 MS modified crRNAs |
| 1071 | SGN005710 SGN005711 |
| | SGN005712 MS modified crRNAs |
| 1072 | SGN005713 SGN005714 |
| | SGN005715 MS modified crRNAs |
| 1073 | SGN005716 SGN005717 |
| | SGN005718 MS modified crRNAs |
| 1074 | MS modified SGN006269 crRNA |
| 1075 | MS modified SGN006270 crRNA |
| 1076 | MS modified SGN006273 crRNA |
| 1077 | MS modified SGN006274 crRNA |
| 1078 | MS modified SGN006275 crRNA |
| 1079 | MS modified SGN006276 crRNA |
| 1080 | MS modified SGN006277 crRNA |
| 1081 | MS modified SGN006278 crRNA |
| 1082 | MS modified SGN006279 crRNA |
| 1083 | MS modified SGN006280 crRNA |
| 1084 | MS modified SGN006281 crRNA |
| 1085 | MS modified SGN006282 crRNA |
| 1086 | MS modified SGN005637 guide RNA |
| 1087 | MS modified SGN005641 guide RNA |
| 1088 | MS modified SGN005649 guide RNA |
| 1089 | MS modified SGN005707 guide RNA |
| 1090 | MS modified SGN006271 guide RNA |
| 1091 | MS modified SGN006272 guide RNA |
| 1092 | MS modified SGN002770 guide RNA |
| 1093 | MS modified SGN002771 guide RNA |
| 1094 | MS modified SGN002772 guide RNA |
| 1095 | MS modified SGN002773 guide RNA |
| 1096 | MS modified SGN002774 guide RNA |
| 1097 | MS modified SGN002775 guide RNA |
| 1098 | MS modified SGN002776 guide RNA |
| 1099 | MS modified SGN002777 guide RNA |
| 1100 | MS modified SGN002778 guide RNA |
| 1101 | MS modified SGN002779 guide RNA |
| 1102 | MS modified SGN002780 guide RNA |
| 1103 | MS modified SGN002781 guide RNA |
| 1104 | MS modified SGN002782 guide RNA |
| 1105 | MS modified SGN002783 guide RNA |
| 1106 | MS modified SGN002784 guide RNA |
| 1107 | MS modified SGN002785 guide RNA |
| 1108 | MS modified SGN002786 guide RNA |
| 1109 | MS modified SGN002787 guide RNA |
| 1110 | MS modified SGN002788 guide RNA |
| 1111 | MS modified SGN002789 guide RNA |
| 1112 | MS modified SGN002790 guide RNA |
| 1113 | MS modified SGN002791 guide RNA |
| 1114 | MS modified SGN002792 guide RNA |
| 1115 | MS modified SGN002793 guide RNA |
| 1116 | MS modified SGN002794 guide RNA |
| 1117 | MS modified SGN002795 guide RNA |
| 1118 | MS modified SGN002796 guide RNA |
| 1119 | MS modified SGN002797 guide RNA |
| 1120 | MS modified SGN002798 guide RNA |
| 1121 | MS modified SGN002799 guide RNA |
| 1122 | MS modified SGN002800 guide RNA |
| 1123 | MS modified SGN002801 guide RNA |
| 1124 | MS modified SGN002802 guide RNA |
| 1125 | MS modified SGN002803 guide RNA |
| 1126 | MS modified SGN003378 guide RNA |
| 1127 | MS modified SGN003379 guide RNA |
| 1128 | MS modified SGN003380 guide RNA |
| 1129 | MS modified SGN003381 guide RNA |
| 1130 | MS modified SGN003382 guide RNA |
| 1131 | MS modified SGN003383 guide RNA |
| 1132 | MS modified SGN003384 guide RNA |
| 1133 | MS modified SGN005042 guide RNA |
| 1134 | MS modified SGN005043 guide RNA |
| 1135 | MS modified SGN005044 guide RNA |
| 1136 | MS modified SGN005050 guide RNA |
| 1137 | MS modified SGN005051 guide RNA |
| 1138 | MS modified SGN005052 guide RNA |
| 1139 | MS modified SGN005053 guide RNA |
| 1140 | MS modified SGN005054 guide RNA |
| 1141 | MS modified SGN005055 guide RNA |
| 1142 | MS modified SGN005056 guide RNA |
| 1143 | MS modified SGN005057 guide RNA |
| 1144 | MS modified SGN005058 guide RNA |
| 1145 | MS modified SGN005059 guide RNA |
| 1146 | MS modified SGN005060 guide RNA |
| 1147 | MS modified SGN005061 guide RNA |
| 1148 | MS modified SGN005062 guide RNA |
| 1149 | MS modified SGN005063 guide RNA |
| 1150 | MS modified SGN005064 guide RNA |
| 1151 | MS modified SGN005065 guide RNA |
| 1152 | MS modified SGN005066 guide RNA |
| 1153 | MS modified SGN005067 guide RNA |
| 1154 | MS modified SGN005068 guide RNA |
| 1155 | MS modified SGN005069 guide RNA |
| 1156 | MS modified SGN005070 guide RNA |
| 1157 | MS modified SGN005071 guide RNA |
| 1158 | MS modified SGN005072 guide RNA |
| 1159 | MS modified SGN005073 guide RNA |
| 1160 | MS modified SGN005074 guide RNA |
| 1161 | MS modified SGN005075 guide RNA |
| 1162 | MS modified SGN005076 guide RNA |
| 1163 | MS modified SGN005077 guide RNA |
| 1164 | MS modified SGN005078 guide RNA |
| 1165 | MS modified SGN005079 guide RNA |
| 1166 | MS modified SGN005104 guide RNA |
| 1167 | MS modified SGN005635 guide RNA |
| 1168 | MS modified SGN005636 guide RNA |
| 1169 | MS modified SGN005638 guide RNA |
| 1170 | MS modified SGN005639 guide RNA |
| 1171 | MS modified SGN005640 guide RNA |
| 1172 | MS modified SGN005642 guide RNA |
| 1173 | MS modified SGN005643 guide RNA |
| 1174 | MS modified SGN005644 guide RNA |
| 1175 | MS modified SGN005645 guide RNA |
| 1176 | MS modified SGN005646 guide RNA |
| 1177 | MS modified SGN005647 guide RNA |
| 1178 | MS modified SGN005648 guide RNA |
| 1179 | MS modified SGN005650 guide RNA |
| 1180 | MS modified SGN005651 guide RNA |
| 1181 | MS modified SGN005683 guide RNA |
| 1182 | MS modified SGN005684 guide RNA |
| 1183 | MS modified SGN005685 guide RNA |
| 1184 | MS modified SGN005686 guide RNA |
| 1185 | MS modified SGN005687 guide RNA |
| 1186 | MS modified SGN005688 guide RNA |
| 1187 | MS modified SGN005689 guide RNA |
| 1188 | MS modified SGN005690 guide RNA |
| 1189 | MS modified SGN005691 guide RNA |
| 1190 | MS modified SGN005692 guide RNA |
| 1191 | MS modified SGN005693 guide RNA |
| 1192 | MS modified SGN005694 guide RNA |
| 1193 | MS modified SGN005695 guide RNA |
| 1194 | MS modified SGN005696 guide RNA |
| 1195 | MS modified SGN005697 guide RNA |
| 1196 | MS modified SGN005698 guide RNA |
| 1197 | MS modified SGN005699 guide RNA |
| 1198 | MS modified SGN005700 guide RNA |
| 1199 | MS modified SGN005701 guide RNA |
| 1200 | MS modified SGN005702 guide RNA |
| 1201 | MS modified SGN005703 guide RNA |
| 1202 | MS modified SGN005704 guide RNA |
| 1203 | MS modified SGN005705 guide RNA |
| 1204 | MS modified SGN005706 guide RNA |
| 1205 | MS modified SGN005708 guide RNA |
| 1206 | MS modified SGN005709 guide RNA |
| 1207 | MS modified SGN005710 guide RNA |
| 1208 | MS modified SGN005711 guide RNA |
| 1209 | MS modified SGN005712 guide RNA |
| 1210 | MS modified SGN005713 guide RNA |
| 1211 | MS modified SGN005714 guide RNA |
| 1212 | MS modified SGN005715 guide RNA |
| 1213 | MS modified SGN005716 guide RNA |
| 1214 | MS modified SGN005717 guide RNA |
| 1215 | MS modified SGN005718 guide RNA |
| 1216 | MS modified SGN006269 guide RNA |
| 1217 | MS modified SGN006270 guide RNA |
| 1218 | MS modified SGN006273 guide RNA |
| 1219 | MS modified SGN006274 guide RNA |
| 1220 | MS modified SGN006275 guide RNA |
| 1221 | MS modified SGN006276 guide RNA |
| 1222 | MS modified SGN006277 guide RNA |
| 1223 | MS modified SGN006278 guide RNA |
| 1224 | MS modified SGN006279 guide RNA |
| 1225 | MS modified SGN006280 guide RNA |
| 1226 | MS modified SGN006281 guide RNA |
| 1227 | MS modified SGN006282 guide RNA |
| 1228 | MS modified APG05083.1 crRNA repeat |
| 1229 | MS modified APG05083.1 tracrRNA |
| 1230 | MS modified APG07513.1 crRNA repeat |
| 1231 | MS modified APG07513.1 tracrRNA |
| 1232 | MS modified APG08290.1 crRNA repeat sequence |
| 1233 | MS modified APG08290.1 tracrRNA |

That which is claimed:

1. A guide RNA (gRNA) comprising a CRISPR RNA (crRNA) and a trans-activating CRISPR RNA (tracrRNA), wherein the crRNA comprises
(i) a crRNA repeat; and
(ii) a spacer,
wherein the tracrRNA comprises:
(iii) an anti-repeat; and
(iv) a tail,
wherein the spacer is capable of hybridizing to a target sequence in a forkhead box P3 (FOXP3) gene,
wherein the target sequence has the nucleotide sequence set forth as any one of SEQ ID NOs: 2, 4, 6, 8, 10, 12, 14, 16, 18, 20, 22, 24, 26, 28, 30, 32, 34, 36, 38, 40, 42, 44, 46, 48, 50, 52, 54, 56, 58, 60, 62, 64, 66, 68, 70, 72, 74, 76, 78, 80, 82, 84, 86, 88, 90, 92, 94, 96, 98, 100, 102, 104, 106, 108, 110, 112, 114, 116, 118, 120, 122, 124, 126, 128, 130, 132, 134, 136, 138, 140, 142, 144, 146, 148, 150, 152, 154, 156, 158, 160, 162, 164, 166, 168, 170, 172, 174, 176, 178, 180, 182, 184, 186, 188, 190, 192, 194, 196, 198, 200, 202, 204, 206, 208, 210, 212, and 214.

2. The gRNA of claim 1, wherein the spacer has a nucleotide sequence that differs in length and/or sequence from any one of SEQ ID NOs: 1, 3, 5, 7, 9, 11, 13, 15, 17, 19, 21, 23, 25, 27, 29, 31, 33, 35, 37, 39, 41, 43, 45, 47, 49, 51, 53, 55, 57, 59, 61, 63, 65, 67, 69, 71, 73, 75, 77, 79, 81, 83, 85, 87, 89, 91, 93, 95, 97, 99, 101, 103, 105, 107, 109, 111, 113, 115, 117, 119, 121, 123, 125, 127, 129, 131, 133, 135, 137, 139, 141, 143, 145, 147, 149, 151, 153, 155, 157, 159, 161, 163, 165, 167, 169, 171, 173, 175, 177, 179, 181, 183, 185, 187, 189, 191, 193, 195, 197, 199, 201, 203, 205, 207, 209, 211, and 213 by lto 5 nucleotides.

3. The gRNA of claim 1, wherein the spacer has the nucleotide sequence set forth as any one of SEQ ID NOs: 1, 3, 5, 7, 9, 11, 13, 15, 17, 19, 21, 23, 25, 27, 29, 31, 33, 35, 37, 39, 41, 43, 45, 47, 49, 51, 53, 55, 57, 59, 61, 63, 65, 67, 69, 71, 73, 75, 77, 79, 81, 83, 85, 87, 89, 91, 93, 95, 97, 99, 101, 103, 105, 107, 109, 111, 113, 115, 117, 119, 121, 123, 125, 127, 129, 131, 133, 135, 137, 139, 141, 143, 145, 147, 149, 151, 153, 155, 157, 159, 161, 163, 165, 167, 169, 171, 173, 175, 177, 179, 181, 183, 185, 187, 189, 191, 193, 195, 197, 199, 201, 203, 205, 207, 209, 211, and 213.

4. The gRNA of any one of claims 1-3, wherein the crRNA repeat has the nucleotide sequence set forth as SEQ ID NO: 546 or a nucleotide sequence that differs in length and/or sequence from SEQ ID NO: 546 by 1 to 8 nucleotides.

5. The gRNA of claim 4, wherein the crRNA repeat has the nucleotide sequence set forth as any one of SEQ ID NOs: 546, 549-552, 839, 842, and 845.

6. The gRNA of any one of claims 1-5, wherein the crRNA has the nucleotide sequence set forth as any one of SEQ ID NOs: 574-692.

7. The gRNA of any one of claims 1-6, wherein the tracrRNA has a nucleotide sequence having at least 80% sequence identity, at least 90% sequence identity, or at least 95% sequence identity to SEQ ID NO: 547.

8. The gRNA of any one of claims 1-6, wherein the tracrRNA has a nucleotide sequence that differs in length from SEQ ID NO: 547 by 1 to 16 nucleotides.

9. The gRNA of claim 8, wherein the tracrRNA has a nucleotide sequence that is 8 nucleotides shorter than SEQ ID NO: 547.

10. The gRNA of claim 8, wherein the tracrRNA has a nucleotide sequence that is 11 nucleotides shorter than SEQ ID NO: 547.

11. The gRNA of claim 7 or 8, wherein the tracrRNA has the nucleotide sequence set forth as any one of SEQ ID NOs: 547, 553-562, 840, 842, and 846.

12. The gRNA of any one of claims 1-3, wherein the gRNA is a single guide RNA (sgRNA) comprising the crRNA and the tracrRNA linked by a linker, wherein the sgRNA comprises a backbone and the spacer, and wherein the backbone of the sgRNA comprises the crRNA repeat, the linker, and the tracrRNA.

13. The gRNA of claim 12, wherein the linker has a nucleotide sequence set forth as AAAG, GAAA, ACUU, or CAAAGG.

14. The gRNA of claim 13, wherein the linker has a nucleotide sequence set forth as AAAG.

15. The gRNA of any one of claims 12-14, wherein the backbone of the sgRNA comprises a total length of at least 85, 90, 95, 100, 105, 110, 115, or 120 nucleotides.

16. The gRNA of any one of claims 12-14, wherein the backbone of the sgRNA comprises a total length of at most 85, 90, 95, 100, 105, 110, 115, or 120 nucleotides.

17. The gRNA of any one of claims 12-14, wherein the backbone of the sgRNA comprises a total length of 86 to 98 nucleotides.

18. The gRNA of any one of claims 12-14, wherein the backbone of the sgRNA comprises a total length of 94 nucleotides.

19. The gRNA of any one of claims 12-14, wherein the backbone of the sgRNA has a nucleotide sequence having at least 80% sequence identity, at least 90% sequence identity, at least 95% sequence identity, or 100% sequence identity to any one of SEQ ID NOs: 563-573.

20. The gRNA of any one of claims 1-3, wherein the gRNA comprises a first stem loop formed by hybridization of the crRNA repeat and the anti-repeat, wherein the first stem loop comprises a first stem and a second stem, and wherein the first stem of the first stem loop comprises a total length of at least 3, 4, 5, 6, 7, 8, 9, 10, or 11 base pairs (bp).

21. The gRNA of any one of claims 1-3, wherein the gRNA comprises a first stem loop formed by hybridization of the crRNA repeat and the anti-repeat, wherein the first stem loop comprises a first stem and a second stem, and wherein the first stem of the first stem loop comprises a total length of at most 3, 4, 5, 6, 7, 8, 9, 10, or 11 bp.

22. The gRNA of claim 20 or 21, wherein the first stem of the first stem loop comprises a total length of 6 bp.

23. The gRNA of claim 20 or 21, wherein the first stem of the first stem loop comprises a total length of 3 bp.

24. The gRNA of any one of claims 1-3, wherein the tail of the tracrRNA comprises a total length of at least 1, 2, 3, 4, 5, 6, or 7 nucleotides.

25. The gRNA of any one of claims 1-3, wherein the tail of the tracrRNA comprises a total length of at most 1, 2, 3, 4, 5, 6, or 7 nucleotides.

26. The gRNA of claim 24 or 25, wherein the tail of the tracrRNA comprises a total length of 3 nucleotides.

27. The gRNA of claim 24 or 25, wherein the tail of the tracrRNA comprises a total length of 1 nucleotide.

28. The gRNA of claim 20 or 21, wherein the gRNA further comprises a second stem loop most proximal to the tail, wherein the second stem loop comprises a first stem and a second stem.

29. The gRNA of claim 28, wherein the first stem of the second stem loop comprises a total length of at least 1, 2, 3, 4, 5, or 6 bp.

30. The gRNA of claim 28, wherein the first stem of the second stem loop comprises a total length of at most 1, 2, 3, 4, 5, or 6 bp.

31. The gRNA of claim 29 or 30, wherein the first stem of the second stem loop comprises a total length of 5 bp.

32. The gRNA of any one of claims 28-31, wherein the first stem of the first stem loop comprises a total length of 6 bp, the tail of the tracrRNA comprises a total length of 3 nucleotides, and the first stem of the second stem loop comprises a total length of 5 bp.

33. The gRNA of any one of claims 1-3, wherein the gRNA is a dual guide RNA (dgRNA).

34. The gRNA of claim 33, wherein the crRNA repeat of the dgRNA comprises a total length of at least 10, 11, 12, 13, 14, 15, 16, 17, 18, 19, 20, or 21 nucleotides.

35. The gRNA of claim 33, wherein the crRNA repeat of the dgRNA comprises a total length of at most 10, 11, 12, 13, 14, 15, 16, 17, 18, 19, 20, or 21 nucleotides.

36. The gRNA of claim 34 or 35, wherein the crRNA repeat of the dgRNA comprises a total length of 13 nucleotides.

37. The gRNA of claim 34 or 35, wherein the crRNA repeat of the dgRNA comprises a total length of 16 nucleotides.

38. The gRNA of claim 34 or 35, wherein the crRNA repeat of the dgRNA comprises a total length of 21 nucleotides.

39. The gRNA of claim 33, wherein the tracrRNA of the dgRNA comprises a total length of at least 65, 70, 75, 80, or 85 nucleotides.

40. The gRNA of claim 33, wherein the tracrRNA of the dgRNA comprises a total length of at most 65, 70, 75, 80, or 85 nucleotides.

41. The gRNA of claim 39 or 40, wherein the tracrRNA of the dgRNA comprises a total length of 74 nucleotides.

42. The gRNA of claim 39 or 40, wherein the tracrRNA of the dgRNA comprises a total length of 77 nucleotides.

43. The gRNA of any one of claims 1-42, wherein the gRNA comprises a total length of at least 85, 90, 95, 100, 105, 110, 115, 120, 125, 130, or 135 nucleotides.

44. The gRNA of any one of claims 1-42, wherein the gRNA comprises a total length of at most 85, 90, 95, 100, 105, 110, 115, 120, 125, 130, or 135 nucleotides.

45. The gRNA of any one of claims 1-42, wherein the gRNA comprises a total length of 106 to 135 nucleotides.

46. The gRNA of claim 45, wherein the gRNA comprises a total length of 117 to 119 nucleotides.

47. The gRNA of any one of claims 1-46, wherein the gRNA is capable of targeting a bound RNA-guided nuclease (RGN) polypeptide to the target sequence.

48. The gRNA of claim 47, wherein the RGN polypeptide is capable of recognizing a consensus protospacer adjacent motif (PAM) having the nucleotide sequence set forth as NNNNCC.

49. The gRNA of claim 48, wherein the RGN polypeptide is capable of recognizing a full protospacer adjacent motif (PAM) having the nucleotide sequence set forth as any one of CAACCCCA, AACCCCAG, TTGTCCAA, CAGGCCTG, GGGTCCTT, CAAGCCCT, ATGCCCAA, CCAACCCC, CATGCCAC, GCCACCAT, GGACCCGA, CCTTCCTT, TTGGCCCT, GGGGCCGA, CTCGCCCA, GCACCCAA, CCCTCCAG, CAGCCCTC, GGCCCCCA, GGGCCCCC, GGCCCCGG, AGGGCCGA, TCCCCCTG, TTCCCCCT, GTTCCCCC, GGTTCCCC, GGGGCCCA, CGGCCCTG, GGGCCCAT, TCGGCCCT, CATGCCTC, GCCTCCTC, TCTTCCTT, TGGCCC, CAGACC, TCGGCC, CTTGCC, GGCCCC, GCAGCC, AAGCCC, GCCTCC, GCCACC, ATCCCC, AAAGCC, CCATCC, CCTTCC, TGGGCC, GGGCCC, CGGGCC, AACCCC, TCGCCC, CATGCC, AGGGCC, TGAACC, CCCGCC, TCTTCC, and GGCTCC.

50. The gRNA of any one of claims 47-49, wherein the RGN polypeptide has an amino acid sequence having at least 80% sequence identity to SEQ ID NO: 545; and wherein the target sequence and the spacer are selected from the group consisting of:
a) a target sequence having the nucleotide sequence set forth as SEQ ID NO: 156 and a spacer having the nucleotide sequence set forth as SEQ ID NO: 155 or a nucleotide sequence that differs in length and/or sequence from SEQ ID NO: 155 by 1 to 5 nucleotides;
b) a target sequence having the nucleotide sequence set forth as SEQ ID NO: 164 and a spacer having the nucleotide sequence set forth as SEQ ID NO: 163 or a nucleotide sequence that differs in length and/or sequence from SEQ ID NO: 163 by 1 to 5 nucleotides;
c) a target sequence having the nucleotide sequence set forth as SEQ ID NO: 190 and a spacer having the nucleotide sequence set forth as SEQ ID NO: 189 or a nucleotide sequence that differs in length and/or sequence from SEQ ID NO: 189 by 1 to 5 nucleotides;
d) a target sequence having the nucleotide sequence set forth as SEQ ID NO: 180 and a spacer having the nucleotide sequence set forth as SEQ ID NO: 179 or a nucleotide sequence that differs in length and/or sequence from SEQ ID NO: 179 by 1 to 5 nucleotides;
e) a target sequence having the nucleotide sequence set forth as SEQ ID NO: 198 and a spacer having the nucleotide sequence set forth as SEQ ID NO: 197 or a nucleotide sequence that differs in length and/or sequence from SEQ ID NO: 197 by 1 to 5 nucleotides; and
f) a target sequence having the nucleotide sequence set forth as SEQ ID NO: 194 and a spacer having the nucleotide sequence set forth as SEQ ID NO: 193 or a nucleotide sequence that differs in length and/or sequence from SEQ ID NO: 193 by 1 to 5 nucleotides.

51. The gRNA of claim 50, wherein the spacer has the nucleotide sequence set forth as any one of SEQ ID NOs: 155, 163, 189, 179, 197, and 193.

52. The gRNA of claim 50 or 51, wherein the RGN polypeptide has the amino acid sequence set forth as SEQ ID NO: 545.

53. The gRNA of any one of claims 47-52, wherein the gRNA has a nucleotide sequence set forth as any one of SEQ ID NOs: 693-834.

54. The gRNA of claim 53, wherein the gRNA has a nucleotide sequence set forth as any one of SEQ ID NOs: 693, 694, 695, 696, 697, and 698.

55. The gRNA of any one of claims 1-54, wherein the gRNA comprises at least one chemical modification.

56. The gRNA of claim 55, wherein the at least one chemical modification comprises a bridged nucleic acid (BNA) modification; 2′-O-methyl (2′-O-Me) modification; 2′-O-methoxy-ethyl (2′MOE) modification; 2′-fluoro (2′-F) modification; 2′F-4′Cα-OMe modification; 2′,4′-di-Cα-OMe modification; 2′-O-methyl 3′phosphorothioate (MS) modification; 2′-O-methyl 3′thiophosphonoacetate (MSP) modification; 2′-O-methyl 3′phosphonoacetate (MP) modification; phosphorothioate (PS) modification; or a combination thereof.

57. The gRNA of claim 56, wherein the at least one chemical modification comprises MS modifications at the 3 terminal nucleotides at the 5′ region and at the 3 terminal nucleotides at the 3′ region of the gRNA.

58. The gRNA of claim 57, wherein the crRNA repeat has the nucleotide sequence set forth as any one of SEQ ID NOs: 940, 942-945, 1228, 1230, and 1232.

59. The gRNA of claim 57 or 58, wherein the crRNA has the nucleotide sequence set forth as any one of SEQ ID NOs: 967-1085.

60. The gRNA of any one of claims 57-59, wherein the tracrRNA has the nucleotide sequence set forth as any one of SEQ ID NOs: 941, 946-955, 1229, 1231, and 1233.

61. The gRNA of any one of claims 57-60, wherein the gRNA has the nucleotide sequence set forth as any one of SEQ ID NOs: 1086-1227.

62. The gRNA of claim 56, wherein the BNA comprises a 2′,4′ BNA modification.

63. The gRNA of claim 62, wherein the 2′,4′ BNA modification is selected from the group consisting of: locked nucleic acid (LNA) modification, BNA^{NC}[N-Me]modification, 2′-0,4′-C-ethylene bridged nucleic acid (2′,4′-ENA) modification, and S-constrained ethyl (cEt) modification.

64. The gRNA of claim 63, wherein the 2′,4′ BNA is a LNA modification.

65. The gRNA of claim 63, wherein the 2′,4′ BNA is a cEt modification.

66. The gRNA of claim 56, wherein the at least one chemical modification comprises a BNA modification, 2′-O-Me modification, PS modification, or a combination thereof.

67. The gRNA of any one of claims 1-66, wherein the gRNA further comprises an extension comprising an edit template for reverse transcriptase (RT) editing.

68. A guide RNA (gRNA) comprising a CRISPR RNA (crRNA) and a trans-activating CRISPR RNA (tracrRNA), wherein the crRNA comprises
(i) a crRNA repeat; and
(ii) a spacer,
wherein the tracrRNA comprises:
(iii) an anti-repeat; and
(iv) a tail,
wherein the spacer has the nucleotide sequence set forth as any one of SEQ ID NOs: 1, 3, 5, 7, 9, 11, 13, 15, 17, 19, 21, 23, 25, 27, 29, 31, 33, 35, 37, 39, 41, 43, 45, 47, 49, 51, 53, 55, 57, 59, 61, 63, 65, 67, 69, 71, 73, 75, 77, 79, 81, 83, 85, 87, 89, 91, 93, 95, 97, 99, 101, 103, 105, 107, 109, 111, 113, 115, 117, 119, 121, 123, 125, 127, 129, 131, 133, 135, 137, 139, 141, 143, 145, 147, 149, 151, 153, 155, 157, 159, 161, 163, 165, 167, 169, 171, 173, 175, 177, 179, 181, 183, 185, 187, 189, 191, 193, 195, 197, 199, 201, 203, 205, 207, 209, 211, and 213, or has a nucleotide sequence that differs in length and/or sequence from any one of SEQ ID NOs: 1, 3, 5, 7, 9, 11, 13, 15, 17, 19, 21, 23, 25, 27, 29, 31, 33, 35, 37, 39, 41, 43, 45, 47, 49, 51, 53, 55, 57, 59, 61, 63, 65, 67, 69, 71, 73, 75, 77, 79, 81, 83, 85, 87, 89, 91, 93, 95, 97, 99, 101, 103, 105, 107, 109, 111, 113, 115, 117, 119, 121, 123, 125, 127, 129, 131, 133, 135, 137, 139, 141, 143, 145, 147, 149, 151, 153, 155, 157, 159, 161, 163, 165, 167, 169, 171, 173, 175, 177, 179, 181, 183, 185, 187, 189, 191, 193, 195, 197, 199, 201, 203, 205, 207, 209, 211, and 213 by 1 to 5 nucleotides.

69. The gRNA of claim 68, wherein the spacer has the nucleotide sequence set forth as any one of SEQ ID NOs: 1, 3, 5, 7, 9, 11, 13, 15, 17, 19, 21, 23, 25, 27, 29, 31, 33, 35, 37, 39, 41, 43, 45, 47, 49, 51, 53, 55, 57, 59, 61, 63, 65, 67, 69, 71, 73, 75, 77, 79, 81, 83, 85, 87, 89, 91, 93, 95, 97, 99, 101, 103, 105, 107, 109, 111, 113, 115, 117, 119, 121, 123, 125, 127, 129, 131, 133, 135, 137, 139, 141, 143, 145, 147, 149, 151, 153, 155, 157, 159, 161, 163, 165, 167, 169, 171, 173, 175, 177, 179, 181, 183, 185, 187, 189, 191, 193, 195, 197, 199, 201, 203, 205, 207, 209, 211, and 213.

70. The gRNA of claim 68 or 69, wherein the spacer is capable of hybridizing to a target sequence set forth as any one of SEQ ID NOs: 2, 4, 6, 8, 10, 12, 14, 16, 18, 20, 22, 24, 26, 28, 30, 32, 34, 36, 38, 40, 42, 44, 46, 48, 50, 52, 54, 56, 58, 60, 62, 64, 66, 68, 70, 72, 74, 76, 78, 80, 82, 84, 86, 88, 90, 92, 94, 96, 98, 100, 102, 104, 106, 108, 110, 112, 114, 116, 118, 120, 122, 124, 126, 128, 130, 132, 134, 136, 138, 140, 142, 144, 146, 148, 150, 152, 154, 156, 158, 160, 162, 164, 166, 168, 170, 172, 174, 176, 178, 180, 182, 184, 186, 188, 190, 192, 194, 196, 198, 200, 202, 204, 206, 208, 210, 212, and 214.

71. A nucleic acid molecule comprising a CRISPR RNA (crRNA) or encoding a crRNA, wherein the crRNA comprises a spacer and a crRNA repeat, wherein the spacer is capable of hybridizing to a target sequence in a forkhead box P3 (FOXP3) gene, and wherein the target sequence has the nucleotide sequence set forth as any one of SEQ ID NOs: 2, 4, 6, 8, 10, 12, 14, 16, 18, 20, 22, 24, 26, 28, 30, 32, 34, 36, 38, 40, 42, 44, 46, 48, 50, 52, 54, 56, 58, 60, 62, 64, 66, 68, 70, 72, 74, 76, 78, 80, 82, 84, 86, 88, 90, 92, 94, 96, 98, 100, 102, 104, 106, 108, 110, 112, 114, 116, 118, 120, 122, 124, 126, 128, 130, 132, 134, 136, 138, 140, 142, 144, 146, 148, 150, 152, 154, 156, 158, 160, 162, 164, 166, 168, 170, 172, 174, 176, 178, 180, 182, 184, 186, 188, 190, 192, 194, 196, 198, 200, 202, 204, 206, 208, 210, 212, and 214.

72. The nucleic acid molecule of claim 71, wherein the spacer has a nucleotide sequence that differs in length and/or sequence from any one of SEQ ID NOs: 1, 3, 5, 7, 9, 11, 13, 15, 17, 19, 21, 23, 25, 27, 29, 31, 33, 35, 37, 39, 41, 43, 45, 47, 49, 51, 53, 55, 57, 59, 61, 63, 65, 67, 69, 71, 73, 75, 77, 79, 81, 83, 85, 87, 89, 91, 93, 95, 97, 99, 101, 103, 105, 107, 109, 111, 113, 115, 117, 119, 121, 123, 125, 127, 129, 131, 133, 135, 137, 139, 141, 143, 145, 147, 149, 151, 153, 155, 157, 159, 161, 163, 165, 167, 169, 171, 173, 175, 177, 179, 181, 183, 185, 187, 189, 191, 193, 195, 197, 199, 201, 203, 205, 207, 209, 211, and 213 by 1 to 5 nucleotides.

73. The nucleic acid molecule of claim 71, wherein the spacer has the nucleotide sequence set forth as any one of SEQ ID NOs: 1, 3, 5, 7, 9, 11, 13, 15, 17, 19, 21, 23, 25, 27, 29, 31, 33, 35, 37, 39, 41, 43, 45, 47, 49, 51, 53, 55, 57, 59, 61, 63, 65, 67, 69, 71, 73, 75, 77, 79, 81, 83, 85, 87, 89, 91, 93, 95, 97, 99, 101, 103, 105, 107, 109, 111, 113, 115, 117, 119, 121, 123, 125, 127, 129, 131, 133, 135, 137, 139, 141, 143, 145, 147, 149, 151, 153, 155, 157, 159, 161, 163, 165, 167, 169, 171, 173, 175, 177, 179, 181, 183, 185, 187, 189, 191, 193, 195, 197, 199, 201, 203, 205, 207, 209, 211, and 213.

74. The nucleic acid molecule of any one of claims 71-73, wherein the crRNA repeat has the nucleotide sequence set forth as SEQ ID NO: 546 or a nucleotide sequence that differs in length and/or sequence from SEQ ID NO: 546 by 1 to 8 nucleotides.

75. The nucleic acid molecule of claim 74, wherein the crRNA repeat has the nucleotide sequence set forth as any one of SEQ ID NOs: 546, 549-552, 839, 842, and 845.

76. The nucleic acid molecule of any one of claims 71-75, wherein the crRNA has the nucleotide sequence set forth as any one of SEQ ID NOs: 574-692.

77. The nucleic acid molecule of any one of claims 71-76, wherein the crRNA is capable of binding a trans-activating CRISPR RNA (tracrRNA) to form a guide RNA (gRNA), wherein the tracrRNA comprises an anti-repeat and a tail.

78. The nucleic acid molecule of claim 77, wherein the tracrRNA has a nucleotide sequence having at least 80% sequence identity, at least 90% sequence identity, or at least 95% sequence identity to SEQ ID NO: 547.

79. The nucleic acid molecule of claim 77, wherein the tracrRNA has a nucleotide sequence that differs in length from SEQ ID NO: 547 by 1 to 16 nucleotides.

80. The nucleic acid molecule of claim 79, wherein the tracrRNA has a nucleotide sequence that is 8 nucleotides shorter than SEQ ID NO: 547.

81. The nucleic acid molecule of claim 79, wherein the tracrRNA has a nucleotide sequence that is 11 nucleotides shorter than SEQ ID NO: 547.

82. The nucleic acid molecule of any one of claims 77-81, wherein the tracrRNA has the nucleotide sequence set forth as any one of SEQ ID NOs: 547, 553-562, 840, 842, and 846.

83. The nucleic acid molecule of claim 77, wherein the gRNA is a single guide RNA (sgRNA) comprising the crRNA and the tracrRNA linked by a linker, wherein the sgRNA comprises a backbone and the spacer, and wherein the backbone of the sgRNA comprises the crRNA repeat, the linker, and the tracrRNA.

84. The nucleic acid molecule of claim 83, wherein the backbone of the sgRNA comprises a total length of 86 to 98 nucleotides.

85. The nucleic acid molecule of claim 83, wherein the backbone of the sgRNA comprises a total length of 94 nucleotides.

86. The nucleic acid molecule of any one of claims 83-85, wherein the backbone of the sgRNA has a nucleotide sequence having at least 80% sequence identity, at least 90% sequence identity, at least 95% sequence identity, or 100% sequence identity to any one of SEQ ID NOs: 563-573.

87. The nucleic acid molecule of any one of claims 77-86, wherein the gRNA comprises a first stem loop comprising a first stem and a second stem formed by hybridization of the crRNA repeat and the anti-repeat, wherein the first stem of the first stem loop comprises a total length of at least 3, 4, 5, 6, 7, 8, 9, 10, or 11 bp.

88. The nucleic acid molecule of any one of claims 77-86, wherein the gRNA comprises a first stem loop comprising a first stem and a second stem formed by hybridization of the crRNA repeat and the anti-repeat, wherein the first stem of the first stem loop comprises a total length of at most 3, 4, 5, 6, 7, 8, 9, 10, or 11 bp.

89. The nucleic acid molecule of claim 87 or 88, wherein the first stem of the first stem loop comprises a total length of 6 bp.

90. The nucleic acid molecule of claim 87 or 88, wherein the first stem of the first stem loop comprises a total length of 3 bp.

91. The nucleic acid molecule of any one of claims 77-90, wherein the tail of the tracrRNA comprises a total length of at least 1, 2, 3, 4, 5, 6, or 7 nucleotides.

92. The nucleic acid molecule of any one of claims 77-90, wherein the tail of the tracrRNA comprises a total length of at most 1, 2, 3, 4, 5, 6, or 7 nucleotides.

93. The nucleic acid molecule of claim 91 or 92, wherein the tail of the tracrRNA comprises a total length of 3 nucleotides.

94. The nucleic acid molecule of claim 91 or 92, wherein the tail of the tracrRNA comprises a total length of 1 nucleotide.

95. The nucleic acid molecule of any one of claims 87-94, wherein the gRNA further comprises a second stem loop most proximal to the tail, wherein the second stem loop comprises a first stem and a second stem.

96. The nucleic acid molecule of claim 95, wherein the first stem of the second stem loop comprises a total length of at least 1, 2, 3, 4, 5, or 6 bp.

97. The nucleic acid molecule of claim 95, wherein the first stem of the second stem loop comprises a total length of at most 1, 2, 3, 4, 5, or 6 bp.

98. The nucleic acid molecule of claim 96 or 97, wherein the first stem of the second stem loop comprises a total length of 5 bp.

99. The nucleic acid molecule of any one of claims 95-98, wherein the first stem of the first stem loop comprises a total length of 6 bp, the tail of the tracrRNA comprises a total length of 3 nucleotides, and the first stem of the second stem loop comprises a total length of 5 bp.

100. The nucleic acid molecule of claim 77, wherein the gRNA is a dual guide RNA (dgRNA).

101. The nucleic acid molecule of claim 100, wherein the crRNA repeat comprises a total length of at least 10, 11, 12, 13, 14, 15, 16, 17, 18, 19, 20, or 21 nucleotides.

102. The nucleic acid molecule of claim 100, wherein the crRNA repeat comprises a total length of at most 10, 11, 12, 13, 14, 15, 16, 17, 18, 19, 20, or 21 nucleotides.

103. The nucleic acid molecule of claim 101 or 102, wherein the crRNA repeat comprises a total length of 13 nucleotides.

104. The nucleic acid molecule of claim 101 or 102, wherein the crRNA repeat comprises a total length of 16 nucleotides.

105. The nucleic acid molecule of claim 101 or 102, wherein the crRNA repeat of the dgRNA comprises a total length of 21 nucleotides.

106. The nucleic acid molecule of any one of claims 100-105, wherein the tracrRNA comprises a total length of at least 65, 70, 75, 80, or 85 nucleotides.

107. The nucleic acid molecule of any one of claims 100-105, wherein the tracrRNA comprises a total length of at most 65, 70, 75, 80, or 85 nucleotides.

108. The nucleic acid molecule of claim 106 or 107, wherein the tracrRNA comprises a total length of 74 nucleotides.

109. The nucleic acid molecule of claim 106 or 107, wherein the tracrRNA comprises a total length of 77 nucleotides.

110. The nucleic acid molecule of any one of claims 77-109, wherein the gRNA comprises a total length of at least 85, 90, 95, 100, 105, 110, 115, 120, 125, 130, or 135 nucleotides.

111. The nucleic acid molecule of any one of claims 77-109, wherein the gRNA comprises a total length of at most 85, 90, 95, 100, 105, 110, 115, 120, 125, 130, or 135 nucleotides.

112. The nucleic acid molecule of any one of claims 77-109, wherein the gRNA comprises a total length of 106 to 135 nucleotides.

113. The nucleic acid molecule of claim 112, wherein the gRNA comprises a total length of 117 to 119 nucleotides.

114. The nucleic acid molecule of any one of claims 77-113, wherein the gRNA is capable of targeting a bound RNA-guided nuclease (RGN) polypeptide to a target sequence.

115. The nucleic acid molecule of claim 114, wherein the RGN polypeptide is capable of recognizing a consensus protospacer adjacent motif (PAM) having the nucleotide sequence set forth as NNNNCC.

116. The nucleic acid molecule of claim 115, wherein the RGN polypeptide is capable of recognizing a full protospacer adjacent motif (PAM) having the nucleotide sequence set forth as any one of CAACCCCA, AACCCCAG, TTGTCCAA, CAGGCCTG, GGGTCCTT, CAAGCCCT, ATGCCCAA, CCAACCCC, CATGCCAC, GCCACCAT, GGACCCGA, CCTTCCTT, TTGGCCCT, GGGGCCGA, CTCGCCCA, GCACCCAA, CCCTCCAG, CAGCCCTC, GGCCCCCA, GGGCCCCC, GGCCCCGG, AGGGCCGA, TCCCCCTG, TTCCCCCT, GTTCCCCC, GGTTCCCC, GGGGCCCA, CGGCCCTG, GGGCCCAT, TCGGCCCT, CATGCCTC, GCCTCCTC, TCTTCCTT, TGGCCC, CAGACC, TCGGCC, CTTGCC, GGCCCC, GCAGCC, AAGCCC, GCCTCC, GCCACC, ATCCCC, AAAGCC, CCATCC, CCTTCC, TGGGCC, GGGCCC, CGGGCC, AACCCC, TCGCCC, CATGCC, AGGGCC, TGAACC, CCCGCC, TCTTCC, and GGCTCC.

117. The nucleic acid molecule of claim any one of claims 114-116, wherein the RGN polypeptide comprises an amino acid sequence having at least 80% sequence identity to SEQ ID NO: 545; and wherein the target sequence and the spacer are selected from the group consisting of:
a) a target sequence having the nucleotide sequence set forth as SEQ ID NO: 156 and a spacer having the nucleotide sequence set forth as SEQ ID NO: 155 or a nucleotide sequence that differs in length and/or sequence from SEQ ID NO: 155 by 1 to 5 nucleotides;
b) a target sequence having the nucleotide sequence set forth as SEQ ID NO: 164 and a spacer having the nucleotide sequence set forth as SEQ ID NO: 163 or a nucleotide sequence that differs in length and/or sequence from SEQ ID NO: 163 by 1 to 5 nucleotides;
c) a target sequence having the nucleotide sequence set forth as SEQ ID NO: 190 and a spacer having the nucleotide sequence set forth as SEQ ID NO: 189 or a nucleotide sequence that differs in length and/or sequence from SEQ ID NO: 189 by 1 to 5 nucleotides;
d) a target sequence having the nucleotide sequence set forth as SEQ ID NO: 180 and a spacer having the nucleotide sequence set forth as SEQ ID NO: 179 or a nucleotide sequence that differs in length and/or sequence from SEQ ID NO: 179 by 1 to 5 nucleotides;
e) a target sequence having the nucleotide sequence set forth as SEQ ID NO: 198 and a spacer having the nucleotide sequence set forth as SEQ ID NO: 197 or a nucleotide sequence that differs in length and/or sequence from SEQ ID NO: 197 by 1 to 5 nucleotides; and
f) a target sequence having the nucleotide sequence set forth as SEQ ID NO: 194 and a spacer having the nucleotide sequence set forth as SEQ ID NO: 193 or a nucleotide sequence that differs in length and/or sequence from SEQ ID NO: 193 by 1 to 5 nucleotides.

118. The nucleic acid molecule of claim 117, wherein the spacer has the nucleotide sequence set forth as any one of SEQ ID NOs: 155, 163, 189, 179, 197, and 193.

119. The nucleic acid molecule of claim 117 or 118, wherein the RGN polypeptide comprises an amino acid sequence set forth as SEQ ID NO: 545.

120. The nucleic acid molecule of any one of claims 77-119, wherein the gRNA has a nucleotide sequence set forth as any one of SEQ ID NOs: 693-834.

121. The nucleic acid molecule of claim 120, wherein the gRNA has a nucleotide sequence set forth as any one of SEQ ID NOs: 693, 694, 695, 696, 697, and 698.

122. The nucleic acid molecule of any one of claims 77-119, wherein the gRNA comprises at least one chemical modification.

123. The nucleic acid molecule of claim 122, wherein the at least one chemical modification comprises a bridged nucleic acid (BNA) modification; 2′-O-methyl (2′-O-Me) modification; 2′-O-methoxy-ethyl (2′MOE) modification; 2′-fluoro (2′-F) modification; 2′F-4′Cα-OMe modification; 2′,4′-di-Cα-OMe modification; 2′-O-methyl 3′phosphorothioate (MS) modification; 2′-O-methyl 3′thiophosphonoacetate (MSP) modification; 2′-O-methyl 3′phosphonoacetate (MP) modification; phosphorothioate (PS) modification; or a combination thereof.

124. The nucleic acid molecule of claim 123, wherein the at least one chemical modification comprises MS modifications at the 3 terminal nucleotides at the 5′ region and at the 3 terminal nucleotides at the 3′ region of the gRNA.

125. The nucleic acid molecule of claim 124, wherein the crRNA repeat has the nucleotide sequence set forth as any one of SEQ ID NOs: 940, 942-945, 1228, 1230, and 1232.

126. The nucleic acid molecule of claim 124 or 125, wherein the crRNA has the nucleotide sequence set forth as any one of SEQ ID NOs: 967-1085.

127. The nucleic acid molecule of any one of claims 124-126, wherein the tracrRNA has the nucleotide sequence set forth as any one of SEQ ID NOs: 941, 946-955, 1229, 1231, and 1233.

128. The nucleic acid molecule of any one of claims 124-127, wherein the gRNA has the nucleotide sequence set forth as any one of SEQ ID NOs: 1086-1227.

129. The nucleic acid molecule of claim 123, wherein the BNA comprises a 2′,4′ BNA modification.

130. The nucleic acid molecule of claim 129, wherein the 2′,4′ BNA modification is selected from the group consisting of: locked nucleic acid (LNA) modification, BNA^{NC}[N-Me]modification, 2′-O,4′-C-ethylene bridged nucleic acid (2′,4′-ENA) modification, and S-constrained ethyl (cEt) modification.

131. The nucleic acid molecule of claim 130, wherein the 2′,4′ BNA is a LNA modification.

132. The nucleic acid molecule of claim 130, wherein the 2′,4′ BNA is a cEt modification.

133. The nucleic acid molecule of claim 123, wherein the at least one chemical modification comprises a BNA modification, 2′-O-Me modification, PS modification, or a combination thereof.

134. The nucleic acid molecule of any one of claims 77-133, wherein the gRNA further comprises an extension comprising an edit template for reverse transcriptase editing.

135. A nucleic acid molecule comprising a CRISPR RNA (crRNA) or encoding a crRNA, wherein the crRNA comprises a spacer and a crRNA repeat, wherein the spacer has the nucleotide sequence set forth as any one of SEQ ID NOs: 1, 3, 5, 7, 9, 11, 13, 15, 17, 19, 21, 23, 25, 27, 29, 31, 33, 35, 37, 39, 41, 43, 45, 47, 49, 51, 53, 55, 57, 59, 61, 63, 65, 67, 69, 71, 73, 75, 77, 79, 81, 83, 85, 87, 89, 91, 93, 95, 97, 99, 101, 103, 105, 107, 109, 111, 113, 115, 117, 119, 121, 123, 125, 127, 129, 131, 133, 135, 137, 139, 141, 143, 145, 147, 149, 151, 153, 155, 157, 159, 161, 163, 165, 167, 169, 171, 173, 175, 177, 179, 181, 183, 185, 187, 189, 191, 193, 195, 197, 199, 201, 203, 205, 207, 209, 211, and 213, or has a nucleotide sequence that differs in length and/or sequence from any one of SEQ ID NOs: 1, 3, 5, 7, 9, 11, 13, 15, 17, 19, 21, 23, 25, 27, 29, 31, 33, 35, 37, 39, 41, 43, 45, 47, 49, 51, 53, 55, 57, 59, 61, 63, 65, 67, 69, 71, 73, 75, 77, 79, 81, 83, 85, 87, 89, 91, 93, 95, 97, 99, 101, 103, 105, 107, 109, 111, 113, 115, 117, 119, 121, 123, 125, 127, 129, 131, 133, 135, 137, 139, 141, 143, 145, 147, 149, 151, 153, 155, 157, 159, 161, 163, 165, 167, 169, 171, 173, 175, 177, 179, 181, 183, 185, 187, 189, 191, 193, 195, 197, 199, 201, 203, 205, 207, 209, 211, and 213 by 1 to 5 nucleotides.

136. The nucleic acid molecule of claim 135, wherein the spacer has the nucleotide sequence set forth as any one of SEQ ID NOs: 1, 3, 5, 7, 9, 11, 13, 15, 17, 19, 21, 23, 25, 27, 29, 31, 33, 35, 37, 39, 41, 43, 45, 47, 49, 51, 53, 55, 57, 59, 61, 63, 65, 67, 69, 71, 73, 75, 77, 79, 81, 83, 85, 87, 89, 91, 93, 95, 97, 99, 101, 103, 105, 107, 109, 111, 113, 115, 117, 119, 121, 123, 125, 127, 129, 131, 133, 135, 137, 139, 141, 143, 145, 147, 149, 151, 153, 155, 157, 159, 161, 163, 165, 167, 169, 171, 173, 175, 177, 179, 181, 183, 185, 187, 189, 191, 193, 195, 197, 199, 201, 203, 205, 207, 209, 211, and 213.

137. The nucleic acid molecule of claim 135 or 136, wherein the spacer is capable of hybridizing to a target sequence, and wherein the target sequence has the nucleotide sequence set forth as any one of SEQ ID NOs: 2, 4, 6, 8, 10, 12, 14, 16, 18, 20, 22, 24, 26, 28, 30, 32, 34, 36, 38, 40, 42, 44, 46, 48, 50, 52, 54, 56, 58, 60, 62, 64, 66, 68, 70, 72, 74, 76, 78, 80, 82, 84, 86, 88, 90, 92, 94, 96, 98, 100, 102, 104, 106, 108, 110, 112, 114, 116, 118, 120, 122, 124, 126, 128, 130, 132, 134, 136, 138, 140, 142, 144, 146, 148, 150, 152, 154, 156, 158, 160, 162, 164, 166, 168, 170, 172, 174, 176, 178, 180, 182, 184, 186, 188, 190, 192, 194, 196, 198, 200, 202, 204, 206, 208, 210, 212, and 214.

138. A vector comprising the nucleic acid molecule of any one of claims 71-76, wherein the nucleic acid molecule comprises a polynucleotide encoding the crRNA.

139. The vector of claim 138, wherein the nucleic acid molecule further comprises a heterologous promoter operably linked to the polynucleotide encoding the crRNA.

140. The vector of claim 139, wherein the heterologous promoter is an RNA polymerase III (pol III) promoter.

141. The vector of any one of claims 138-140, wherein the vector further comprises a nucleic acid molecule encoding an RGN polypeptide.

142. The vector of claim 141, wherein the crRNA is capable of binding a tracrRNA to form a guide RNA, and wherein the guide RNA is capable of binding to the RGN polypeptide.

143. The vector of claim 141 or 142, wherein the vector further comprises a promoter operably linked to the nucleic acid molecule encoding the RGN polypeptide.

144. A vector comprising the nucleic acid molecule of any one of claims 77-134, wherein the nucleic acid molecule comprises a polynucleotide encoding the crRNA, and wherein the vector further comprises a polynucleotide encoding the tracrRNA.

145. The vector of claim 144, wherein the polynucleotide encoding the crRNA and the polynucleotide encoding the tracrRNA are operably linked to the same promoter and are encoded as a sgRNA.

146. The vector of claim 144, wherein the polynucleotide encoding the crRNA and the polynucleotide encoding the tracrRNA are operably linked to separate promoters.

147. The vector of any one of claims 144-146, wherein the vector further comprises a nucleic acid molecule encoding an RGN polypeptide.

148. The vector of claim 147, wherein the crRNA is capable of binding the tracrRNA to form a guide RNA, and wherein the guide RNA is capable of binding to the RGN polypeptide.

149. The vector of claim 147 or 148, wherein the vector further comprises a promoter operably linked to the nucleic acid molecule encoding the RGN polypeptide.

150. A cell comprising the gRNA of any one of claims 1-70, the nucleic acid molecule of any one of claims 71-137, or the vector of any one of claims 138-149.

151. An RNA-guided nuclease (RGN) system for binding a target sequence within a forkhead box P3 (FOXP3) gene, wherein the RGN system comprises:
a) one or more guide RNA (gRNA) of any one of claims 1-70, or one or more polynucleotides comprising one or more nucleotide sequences encoding the one or more gRNA of any one of claims 1-70; and
b) an RGN polypeptide, or a polynucleotide comprising a nucleotide sequence encoding the RGN polypeptide.

152. The RGN system of claim 151, wherein the one or more gRNA is capable of forming a complex with the RGN polypeptide to direct the RGN polypeptide to bind to the target sequence.

153. The RGN system of claim 151 or 152, wherein the RGN polypeptide is capable of recognizing a consensus protospacer adjacent motif (PAM) having the nucleotide sequence set forth as NNNNCC.

154. The RGN system of claim 153, wherein the RGN polypeptide is capable of recognizing a full PAM having a nucleotide sequence set forth as any one of CAACCCCA, AACCCCAG, TTGTCCAA, CAGGCCTG, GGGTCCTT, CAAGCCCT, ATGCCCAA, CCAACCCC, CATGCCAC, GCCACCAT, GGACCCGA, CCTTCCTT, TTGGCCCT, GGGGCCGA, CTCGCCCA, GCACCCAA, CCCTCCAG, CAGCCCTC, GGCCCCCA, GGGCCCCC, GGCCCCGG, AGGGCCGA, TCCCCCTG, TTCCCCCT, GTTCCCCC, GGTTCCCC, GGGGCCCA, CGGCCCTG, GGGCCCAT, TCGGCCCT, CATGCCTC, GCCTCCTC, TCTTCCTT, TGGCCC, CAGACC, TCGGCC, CTTGCC, GGCCCC, GCAGCC, AAGCCC, GCCTCC, GCCACC, ATCCCC, AAAGCC, CCATCC, CCTTCC, TGGGCC, GGGCCC, CGGGCC, AACCCC, TCGCCC, CATGCC, AGGGCC, TGAACC, CCCGCC, TCTTCC, and GGCTCC.

155. The RGN system of any one of claims 151-154, wherein the RGN polypeptide comprises an amino acid sequence set forth as SEQ ID NO: 545.

156. The RGN system of any one of claims 151-155, wherein the polynucleotide comprising a nucleotide sequence encoding the RGN polypeptide is codon optimized for expression in a mammalian cell.

157. The RGN system of any one of claims 151-156, wherein at least one of the one or more nucleotide sequences encoding the one or more gRNAs and the nucleotide sequence encoding the RGN polypeptide is operably linked to a promoter heterologous to the nucleotide sequence.

158. The RGN system of any one of claims 151-157, wherein the one or more nucleotide sequences encoding the one or more gRNAs and the nucleotide sequence encoding the RGN polypeptide are located on one vector.

159. The RGN system of any one of claims 151-155, wherein the polynucleotide comprising a nucleotide sequence encoding the RGN polypeptide comprises an mRNA.

160. The RGN system of any one of claims 151-159, wherein the RGN polypeptide is nuclease inactive or is a nickase.

161. The RGN system of any one of claims 151-160, wherein the RGN polypeptide is fused to a base-editing polypeptide.

162. The RGN system of claim 161, wherein the base-editing polypeptide comprises a deaminase.

163. The RGN system of any one of claims 151-160, wherein the RGN polypeptide is fused to a reverse transcriptase (RT) editing polypeptide.

164. The RGN system of claim 163, wherein the RT editing polypeptide comprises a DNA polymerase.

165. The RGN system of claim 164, wherein the DNA polymerase comprises a reverse transcriptase.

166. The RGN system of any one of claims 163-165, wherein the gRNA further comprises an extension comprising an edit template for RT editing.

167. The RGN system of any one of claims 151-166, wherein the RGN polypeptide comprises one or more nuclear localization signals.

168. A ribonucleoprotein (RNP) complex comprising the one or more gRNA and the RGN polypeptide of the RGN system of any one of claims 151-167.

169. A cell comprising the RGN system of any one of claims 151-167 or the RNP complex of claim 168.

170. The cell of claim 169, wherein the cell is a eukaryotic cell.

171. The cell of claim 170, wherein the eukaryotic cell is a mammalian cell.

172. The cell of claim 171, wherein the mammalian cell is a human cell.

173. The cell of claim 171 or 172, wherein the mammalian cell or human cell is a T cell or an induced pluripotent stem cell.

174. A method for binding a target sequence within a FOXP3 gene, comprising delivering the RGN system of any one of claims 151-167 or the RNP complex of claim 168 to the target sequence or a cell comprising the target sequence.

175. The method of claim 174, wherein cleavage or modification of the target sequence occurs.

176. A method for assembling an RNA-guided nuclease (RGN) ribonucleoprotein complex, the method comprising combining under conditions suitable for formation of the complex:
a) the guide RNA of any one of claims 1-70; and
b) an RGN polypeptide that binds the guide RNA.

177. The method of claim 176, wherein the RGN polypeptide is capable of recognizing a consensus protospacer adjacent motif (PAM) having the nucleotide sequence set forth as NNNNCC.

178. The method of claim 176 or 177, wherein the complex directs cleavage of the target sequence.

179. The method of claim 178, wherein the cleavage generates a double-stranded break.

180. The method of claim 178, wherein the cleavage generates a single-stranded break.

181. A method for binding a target sequence within a FOXP3 gene, the method comprising:
a) combining under conditions suitable for formation of a ribonucleoprotein (RNP) complex:
i) the guide RNA of any one of claims 1-70; and
ii) an RGN polypeptide that binds the guide RNA;
thereby assembling an RNP complex; and
b) contacting the target sequence or a cell comprising the target sequence with the assembled RNP complex.

182. The method of claim 181, wherein the guide RNA hybridizes to the target sequence, thereby directing binding of the RNP complex to the target sequence.

183. The method of claim 181 or 182, wherein the RGN polypeptide is capable of recognizing a consensus protospacer adjacent motif (PAM) having the nucleotide sequence set forth as NNNNCC.

184. The method of claim 183, wherein the RGN polypeptide is capable of recognizing a full protospacer adjacent motif (PAM) having the nucleotide sequence set forth as any one of CAACCCCA, AACCCCAG, TTGTCCAA, CAGGCCTG, GGGTCCTT, CAAGCCCT, ATGCCCAA, CCAACCCC, CATGCCAC, GCCACCAT, GGACCCGA, CCTTCCTT, TTGGCCCT, GGGGCCGA, CTCGCCCA, GCACCCAA, CCCTCCAG, CAGCCCTC, GGCCCCCA, GGGCCCCC, GGCCCCGG, AGGGCCGA, TCCCCCTG, TTCCCCCT, GTTCCCCC, GGTTCCCC, GGGGCCCA, CGGCCCTG, GGGCCCAT, TCGGCCCT, CATGCCTC, GCCTCCTC, TCTTCCTT, TGGCCC, CAGACC, TCGGCC, CTTGCC, GGCCCC, GCAGCC, AAGCCC, GCCTCC, GCCACC, ATCCCC, AAAGCC, CCATCC, CCTTCC, TGGGCC, GGGCCC, CGGGCC, AACCCC, TCGCCC, CATGCC, AGGGCC, TGAACC, CCCGCC, TCTTCC, and GGCTCC.

185. The method of any one of claims 181-184, wherein the RGN polypeptide comprises an amino acid sequence set forth as SEQ ID NO: 545.

186. The method of any one of claims 181-185, wherein the method is performed in vitro or ex vivo.

187. The method of any one of claims 181-186, wherein the RGN polypeptide is capable of cleaving the target sequence, thereby allowing for the cleaving and/or modifying of the target sequence.

188. The method of claim 187, wherein the cleaving generates a single-stranded break.

189. The method of claim 187, wherein the cleaving generates a double-stranded break.

190. The method of claim 187, wherein the cleaving results in insertion of a heterologous sequence within the target sequence.

191. The method of any one of claims 181-186, wherein the RGN polypeptide is nuclease inactive or is a nickase.

192. The method of claim 191, wherein the RGN polypeptide is fused to a base-editing polypeptide.

193. The method of claim 192, wherein the base-editing polypeptide comprises a deaminase.

194. The method of any one of claims 181-186, wherein the RGN is fused to a reverse transcriptase (RT) editing polypeptide.

195. The method of claim 194, wherein the RT editing polypeptide comprises a DNA polymerase.

196. The method of claim 195, wherein the DNA polymerase comprises a reverse transcriptase.

197. The method of any one of claims 194-196, wherein the gRNA further comprises an extension comprising an edit template for RT editing.

198. A method for modulating expression of a forkhead box P3 (FOXP3) gene in a population of cells, comprising delivering the RGN system of any one of claims 151-167 or the RNP complex of claim 168 to the population of cells, wherein the population of cells comprises the target sequence, and wherein FOXP3 gene expression is modulated as compared to FOXP3 gene expression in a control population of cells.

199. The method of claim 198, wherein cleavage or modification of the target sequence occurs.

200. The method of claim 199, wherein cleavage or modification of the target sequence is detected by sequencing.

201. The method of any one of claims 198-200, wherein FOXP3 gene expression is measured by quantitative PCR, microarray, RNA-seq, flow cytometry, immunoblot, enzyme-linked immunosorbent assay (ELISA), protein immunoprecipitation, immunostaining, high performance liquid chromatography (HPLC), liquid chromatography-mass spectrometry (LC/MS), mass spectrometry, or a combination thereof.

202. The method of any one of claims 198-201, wherein FOXP3 gene expression is decreased.

203. The method of claim 202, wherein the decrease in FOXP3 gene expression comprises decrease in FOXP3 mRNA and/or Foxp3 protein level.

204. The method of any one of claims 199-203, wherein cleavage or modification of the target sequence occurs at a rate of 40% to 100%.

205. The method of any one of claims 199-204, wherein cleavage or modification of the target sequence occurs at a rate of 80% to 100%.

206. The method of any one of claims 198-205, wherein the control population of cells has not been subjected to the delivering.

207. The method of any one of claims 198-206, wherein the population of cells comprises T cells.

The application's sequence listing, which the Patent Office published only in electronic form, follows.

SEQUENCE LISTING (1233 sequences)

SEQ ID NO: 1 - RNA, 20 nt, synthetic construct
  source 1..20: mol_type = other RNA
ttggacaaggacccgatgcc

SEQ ID NO: 2 - DNA, 20 bp, Homo sapiens
  source 1..20: mol_type = genomic DNA
ttggacaaggacccgatgcc

SEQ ID NO: 3 - RNA, 20 nt, synthetic construct
  source 1..20: mol_type = other RNA
tggacaaggacccgatgccc

SEQ ID NO: 4 - DNA, 20 bp, Homo sapiens
  source 1..20: mol_type = genomic DNA
tggacaaggacccgatgccc

SEQ ID NO: 5 - RNA, 20 nt, synthetic construct
  source 1..20: mol_type = other RNA
tggggttgggcatcgggtcc

SEQ ID NO: 6 - DNA, 20 bp, Homo sapiens
  source 1..20: mol_type = genomic DNA
tggggttgggcatcgggtcc

SEQ ID NO: 7 - RNA, 20 nt, synthetic construct
  source 1..20: mol_type = other RNA
aaggacccgatgcccaaccc

SEQ ID NO: 8 - DNA, 20 bp, Homo sapiens
  source 1..20: mol_type = genomic DNA
aaggacccgatgcccaaccc

SEQ ID NO: 9 - RNA, 20 nt, synthetic construct
  source 1..20: mol_type = other RNA
caggcctggggttgggcatc

SEQ ID NO: 10 - DNA, 20 bp, Homo sapiens
  source 1..20: mol_type = genomic DNA
caggcctggggttgggcatc

SEQ ID NO: 11 - RNA, 20 nt, synthetic construct
  source 1..20: mol_type = other RNA
atgcccaaccccaggcctgg

SEQ ID NO: 12 - DNA, 20 bp, Homo sapiens
  source 1..20: mol_type = genomic DNA
atgcccaaccccaggcctgg

SEQ ID NO: 13 - RNA, 20 nt, synthetic construct
  source 1..20: mol_type = other RNA
tgcccttggacaaggacccg

SEQ ID NO: 14 - DNA, 20 bp, Homo sapiens
  source 1..20: mol_type = genomic DNA
tgcccttggacaaggacccg

SEQ ID NO: 15 - RNA, 20 nt, synthetic construct
  source 1..20: mol_type = other RNA
cttggacaaggacccgatgc

SEQ ID NO: 16 - DNA, 20 bp, Homo sapiens
  source 1..20: mol_type = genomic DNA
cttggacaaggacccgatgc

SEQ ID NO: 17 - RNA, 20 nt, synthetic construct
  source 1..20: mol_type = other RNA
tcctcttcttccttgaaccc

SEQ ID NO: 18 - DNA, 20 bp, Homo sapiens
  source 1..20: mol_type = genomic DNA
tcctcttcttccttgaaccc

SEQ ID NO: 19 - RNA, 20 nt, synthetic construct
  source 1..20: mol_type = other RNA
tcttcttccttgaaccccat

SEQ ID NO: 20 - DNA, 20 bp, Homo sapiens
  source 1..20: mol_type = genomic DNA
tcttcttccttgaaccccat

SEQ ID NO: 21 - RNA, 20 nt, synthetic construct
  source 1..20: mol_type = other RNA
cgcagcctgcccttggacaa

SEQ ID NO: 22 - DNA, 20 bp, Homo sapiens
  source 1..20: mol_type = genomic DNA
cgcagcctgcccttggacaa

SEQ ID NO: 23 - RNA, 20 nt, synthetic construct
  source 1..20: mol_type = other RNA
ggaaggggccgagggcttgc

SEQ ID NO: 24 - DNA, 20 bp, Homo sapiens
  source 1..20: mol_type = genomic DNA
ggaaggggccgagggcttgc

SEQ ID NO: 25 - RNA, 20 nt, synthetic construct
  source 1..20: mol_type = other RNA
ggcctggcaagccctcggcc

SEQ ID NO: 26 - DNA, 20 bp, Homo sapiens
  source 1..20: mol_type = genomic DNA
ggcctggcaagccctcggcc

SEQ ID NO: 27 - RNA, 20 nt, synthetic construct
  source 1..20: mol_type = other RNA
gcaagccctcggccccttcc

SEQ ID NO: 28 - DNA, 20 bp, Homo sapiens
  source 1..20: mol_type = genomic DNA
gcaagccctcggccccttcc

SEQ ID NO: 29 - RNA, 20 nt, synthetic construct
  source 1..20: mol_type = other RNA
atgggccaagggccaaggaa

SEQ ID NO: 30 - DNA, 20 bp, Homo sapiens
  source 1..20: mol_type = genomic DNA
atgggccaagggccaaggaa

SEQ ID NO: 31 - RNA, 20 nt, synthetic construct
  source 1..20: mol_type = other RNA
cttggcccatccccaggagc

SEQ ID NO: 32 - DNA, 20 bp, Homo sapiens
  source 1..20: mol_type = genomic DNA
cttggcccatccccaggagc

SEQ ID NO: 33 - RNA, 20 nt, synthetic construct
  source 1..20: mol_type = other RNA
cctcgcccagctggagggct

SEQ ID NO: 34 - DNA, 20 bp, Homo sapiens
  source 1..20: mol_type = genomic DNA
cctcgcccagctggagggct

SEQ ID NO: 35 - RNA, 20 nt, synthetic construct
  source 1..20: mol_type = other RNA
gtctgaggctttgggtgcag

SEQ ID NO: 36 - DNA, 20 bp, Homo sapiens
  source 1..20: mol_type = genomic DNA
gtctgaggctttgggtgcag

SEQ ID NO: 37 - RNA, 20 nt, synthetic construct
  source 1..20: mol_type = other RNA
caggtctgaggctttgggtg

SEQ ID NO: 38 - DNA, 20 bp, Homo sapiens
  source 1..20: mol_type = genomic DNA
caggtctgaggctttgggtg

SEQ ID NO: 39 - RNA, 20 nt, synthetic construct
  source 1..20: mol_type = other RNA
aaggttccccctgggccccg

SEQ ID NO: 40 - DNA, 20 bp, Homo sapiens
  source 1..20: mol_type = genomic DNA
aaggttccccctgggccccg

SEQ ID NO: 41 - RNA, 20 nt, synthetic construct
  source 1..20: mol_type = other RNA
gaaggttccccctgggcccc

SEQ ID NO: 42 - DNA, 20 bp, Homo sapiens
  source 1..20: mol_type = genomic DNA
gaaggttccccctgggcccc

SEQ ID NO: 43 - RNA, 20 nt, synthetic construct
  source 1..20: mol_type = other RNA
gccctggaaggttccccctg

SEQ ID NO: 44 - DNA, 20 bp, Homo sapiens
  source 1..20: mol_type = genomic DNA
gccctggaaggttccccctg

SEQ ID NO: 45 - RNA, 20 nt, synthetic construct
  source 1..20: mol_type = other RNA
gggcccagggggaaccttcc

SEQ ID NO: 46 - DNA, 20 bp, Homo sapiens
  source 1..20: mol_type = genomic DNA
gggcccagggggaaccttcc

SEQ ID NO: 47 - RNA, 20 nt, synthetic construct
  source 1..20: mol_type = other RNA
agatctcggccctggaaggt

SEQ ID NO: 48 - DNA, 20 bp, Homo sapiens
  source 1..20: mol_type = genomic DNA
agatctcggccctggaaggt

SEQ ID NO: 49 - RNA, 20 nt, synthetic construct
  source 1..20: mol_type = other RNA
aagatctcggccctggaagg

SEQ ID NO: 50 - DNA, 20 bp, Homo sapiens
  source 1..20: mol_type = genomic DNA
aagatctcggccctggaagg

SEQ ID NO: 51 - RNA, 20 nt, synthetic construct
  source 1..20: mol_type = other RNA
gaagatctcggccctggaag

SEQ ID NO: 52 - DNA, 20 bp, Homo sapiens
  source 1..20: mol_type = genomic DNA
gaagatctcggccctggaag

SEQ ID NO: 53 - RNA, 20 nt, synthetic construct
  source 1..20: mol_type = other RNA
cgaagatctcggccctggaa

SEQ ID NO: 54 - DNA, 20 bp, Homo sapiens
  source 1..20: mol_type = genomic DNA
cgaagatctcggccctggaa

SEQ ID NO: 55 - RNA, 20 nt, synthetic construct
  source 1..20: mol_type = other RNA
agggccgagatcttcgaggc

SEQ ID NO: 56 - DNA, 20 bp, Homo sapiens
  source 1..20: mol_type = genomic DNA
agggccgagatcttcgaggc

SEQ ID NO: 57 - RNA, 20 nt, synthetic construct
  source 1..20: mol_type = other RNA
gggccccgcctcgaagatct

SEQ ID NO: 58 - DNA, 20 bp, Homo sapiens
  source 1..20: mol_type = genomic DNA
gggccccgcctcgaagatct

SEQ ID NO: 59 - RNA, 20 nt, synthetic construct
  source 1..20: mol_type = other RNA
gggccgagatcttcgaggcg

SEQ ID NO: 60 - DNA, 20 bp, Homo sapiens
  source 1..20: mol_type = genomic DNA
gggccgagatcttcgaggcg

SEQ ID NO: 61 - RNA, 20 nt, synthetic construct
  source 1..20: mol_type = other RNA
tgggccccgcctcgaagatc

SEQ ID NO: 62 - DNA, 20 bp, Homo sapiens
  source 1..20: mol_type = genomic DNA
tgggccccgcctcgaagatc

SEQ ID NO: 63 - RNA, 20 nt, synthetic construct
  source 1..20: mol_type = other RNA
gagatcttcgaggcggggcc

SEQ ID NO: 64 - DNA, 20 bp, Homo sapiens
  source 1..20: mol_type = genomic DNA
gagatcttcgaggcggggcc

SEQ ID NO: 65 - RNA, 20 nt, synthetic construct
  source 1..20: mol_type = other RNA
atcttcgaggcggggcccat

SEQ ID NO: 66 - DNA, 20 bp, Homo sapiens
  source 1..20: mol_type = genomic DNA
atcttcgaggcggggcccat

SEQ ID NO: 67 - RNA, 20 nt, synthetic construct
  source 1..20: mol_type = other RNA
gcggggcccatgcctcctct

SEQ ID NO: 68 - DNA, 20 bp, Homo sapiens
  source 1..20: mol_type = genomic DNA
gcggggcccatgcctcctct

SEQ ID NO: 69 - RNA, 25 nt, synthetic construct
  source 1..25: mol_type = other RNA
cttgccaggcctggggttgggcatc

SEQ ID NO: 70 - DNA, 25 bp, Homo sapiens
  source 1..25: mol_type = genomic DNA
cttgccaggcctggggttgggcatc

SEQ ID NO: 71 - RNA, 25 nt, synthetic construct
  source 1..25: mol_type = other RNA
acccgatgcccaaccccaggcctgg

SEQ ID NO: 72 - DNA, 25 bp, Homo sapiens
  source 1..25: mol_type = genomic DNA
acccgatgcccaaccccaggcctgg

SEQ ID NO: 73 - RNA, 25 nt, synthetic construct
  source 1..25: mol_type = other RNA
gccaaggaaggggccgagggcttgc

SEQ ID NO: 74 - DNA, 25 bp, Homo sapiens
  source 1..25: mol_type = genomic DNA
gccaaggaaggggccgagggcttgc

SEQ ID NO: 75 - RNA, 25 nt, synthetic construct
  source 1..25: mol_type = other RNA
agcaggtctgaggctttgggtgcag

SEQ ID NO: 76 - DNA, 25 bp, Homo sapiens
  source 1..25: mol_type = genomic DNA
agcaggtctgaggctttgggtgcag

SEQ ID NO: 77 - RNA, 25 nt, synthetic construct
  source 1..25: mol_type = other RNA
tctcggccctggaaggttccccctg

SEQ ID NO: 78 - DNA, 25 bp, Homo sapiens
  source 1..25: mol_type = genomic DNA
tctcggccctggaaggttccccctg

SEQ ID NO: 79 - RNA, 25 nt, synthetic construct
  source 1..25: mol_type = other RNA
ctcgaagatctcggccctggaaggt

SEQ ID NO: 80 - DNA, 25 bp, Homo sapiens
  source 1..25: mol_type = genomic DNA
ctcgaagatctcggccctggaaggt

SEQ ID NO: 81 - RNA, 25 nt, synthetic construct
  source 1..25: mol_type = other RNA
cctcgaagatctcggccctggaagg

SEQ ID NO: 82 - DNA, 25 bp, Homo sapiens
  source 1..25: mol_type = genomic DNA
cctcgaagatctcggccctggaagg

SEQ ID NO: 83 - RNA, 24 nt, synthetic construct
  source 1..24: mol_type = other RNA
ttgccaggcctggggttgggcatc

SEQ ID NO: 84 - DNA, 24 bp, Homo sapiens
  source 1..24: mol_type = genomic DNA
ttgccaggcctggggttgggcatc

SEQ ID NO: 85 - RNA, 24 nt, synthetic construct
  source 1..24: mol_type = other RNA
gcaggtctgaggctttgggtgcag

SEQ ID NO: 86 - DNA, 24 bp, Homo sapiens
  source 1..24: mol_type = genomic DNA
gcaggtctgaggctttgggtgcag

SEQ ID NO: 87 - RNA, 24 nt, synthetic construct
  source 1..24: mol_type = other RNA
ctcgaagatctcggccctggaagg

SEQ ID NO: 88 - DNA, 24 bp, Homo sapiens
  source 1..24: mol_type = genomic DNA
ctcgaagatctcggccctggaagg

SEQ ID NO: 89 - RNA, 25 nt, synthetic construct
  source 1..25: mol_type = other RNA
agccctcggccccttccttggccct

SEQ ID NO: 90 - DNA, 25 bp, Homo sapiens
  source 1..25: mol_type = genomic DNA
agccctcggccccttccttggccct

SEQ ID NO: 91 - RNA, 25 nt, synthetic construct
  source 1..25: mol_type = other RNA
agctggagggctgcacccaaagcct

SEQ ID NO: 92 - DNA, 25 bp, Homo sapiens
  source 1..25: mol_type = genomic DNA
agctggagggctgcacccaaagcct

SEQ ID NO: 93 - RNA, 25 nt, synthetic construct
  source 1..25: mol_type = other RNA
aggcatgggccccgcctcgaagatc

SEQ ID NO: 94 - DNA, 25 bp, Homo sapiens
  source 1..25: mol_type = genomic DNA
aggcatgggccccgcctcgaagatc

SEQ ID NO: 95 - RNA, 25 nt, synthetic construct
  source 1..25: mol_type = other RNA
caagggccaaggaaggggccgaggg

SEQ ID NO: 96 - DNA, 25 bp, Homo sapiens
  source 1..25: mol_type = genomic DNA
caagggccaaggaaggggccgaggg

SEQ ID NO: 97 - RNA, 25 nt, synthetic construct
  source 1..25: mol_type = other RNA
ccaaccccaggcctggcaagccctc

SEQ ID NO: 98 - DNA, 25 bp, Homo sapiens
  source 1..25: mol_type = genomic DNA
ccaaccccaggcctggcaagccctc

SEQ ID NO: 99 - RNA, 25 nt, synthetic construct
  source 1..25: mol_type = other RNA
ccccagcaggtctgaggctttgggt

SEQ ID NO: 100 - DNA, 25 bp, Homo sapiens
  source 1..25: mol_type = genomic DNA
ccccagcaggtctgaggctttgggt

SEQ ID NO: 101 - RNA, 25 nt, synthetic construct
  source 1..25: mol_type = other RNA
cccgatgcccaaccccaggcctggc

SEQ ID NO: 102 - DNA, 25 bp, Homo sapiens
  source 1..25: mol_type = genomic DNA
cccgatgcccaaccccaggcctggc

SEQ ID NO: 103 - RNA, 25 nt, synthetic construct
  source 1..25: mol_type = other RNA
ccgagatcttcgaggcggggcccat

SEQ ID NO: 104 - DNA, 25 bp, Homo sapiens
  source 1..25: mol_type = genomic DNA
ccgagatcttcgaggcggggcccat

SEQ ID NO: 105 - RNA, 25 nt, synthetic construct
  source 1..25: mol_type = other RNA
cctcctcttcttccttgaaccccat

SEQ ID NO: 106 - DNA, 25 bp, Homo sapiens
  source 1..25: mol_type = genomic DNA
cctcctcttcttccttgaaccccat

SEQ ID NO: 107 - RNA, 25 nt, synthetic construct
  source 1..25: mol_type = other RNA
cctggcaagccctcggccccttcct

SEQ ID NO: 108 - DNA, 25 bp, Homo sapiens
  source 1..25: mol_type = genomic DNA
cctggcaagccctcggccccttcct

SEQ ID NO: 109 - RNA, 25 nt, synthetic construct
  source 1..25: mol_type = other RNA
cggccccttccttggcccttggccc

SEQ ID NO: 110 - DNA, 25 bp, Homo sapiens
  source 1..25: mol_type = genomic DNA
cggccccttccttggcccttggccc

SEQ ID NO: 111 - RNA, 25 nt, synthetic construct
  source 1..25: mol_type = other RNA
ctcgcccagctggagggctgcaccc

SEQ ID NO: 112 - DNA, 25 bp, Homo sapiens
  source 1..25: mol_type = genomic DNA
ctcgcccagctggagggctgcaccc

SEQ ID NO: 113 - RNA, 25 nt, synthetic construct
  source 1..25: mol_type = other RNA
ctcggccccttccttggcccttggc

SEQ ID NO: 114 - DNA, 25 bp, Homo sapiens
  source 1..25: mol_type = genomic DNA
ctcggccccttccttggcccttggc

SEQ ID NO: 115 - RNA, 25 nt, synthetic construct
  source 1..25: mol_type = other RNA
ctgggggcccggggcccagggggaa

SEQ ID NO: 116 - DNA, 25 bp, Homo sapiens
  source 1..25: mol_type = genomic DNA
ctgggggcccggggcccagggggaa

SEQ ID NO: 117 - RNA, 25 nt, synthetic construct
  source 1..25: mol_type = other RNA
gatctcggccctggaaggttccccc

SEQ ID NO: 118 - DNA, 25 bp, Homo sapiens
  source 1..25: mol_type = genomic DNA
gatctcggccctggaaggttccccc

SEQ ID NO: 119 - RNA, 25 nt, synthetic construct
  source 1..25: mol_type = other RNA
gcacccaaagcctcagacctgctgg

SEQ ID NO: 120 - DNA, 25 bp, Homo sapiens
  source 1..25: mol_type = genomic DNA
gcacccaaagcctcagacctgctgg

SEQ ID NO: 121 - RNA, 25 nt, synthetic construct
  source 1..25: mol_type = other RNA
gcccaaccccaggcctggcaagccc

SEQ ID NO: 122 - DNA, 25 bp, Homo sapiens
  source 1..25: mol_type = genomic DNA
gcccaaccccaggcctggcaagccc

SEQ ID NO: 123 - RNA, 25 nt, synthetic construct
  source 1..25: mol_type = other RNA
gccctggaaggttccccctgggccc

SEQ ID NO: 124 - DNA, 25 bp, Homo sapiens
  source 1..25: mol_type = genomic DNA
gccctggaaggttccccctgggccc

SEQ ID NO: 125 - RNA, 25 nt, synthetic construct
  source 1..25: mol_type = other RNA
ggcccatgcctcctcttcttccttg

SEQ ID NO: 126 - DNA, 25 bp, Homo sapiens
  source 1..25: mol_type = genomic DNA
ggcccatgcctcctcttcttccttg

SEQ ID NO: 127 - RNA, 25 nt, synthetic construct
  source 1..25: mol_type = other RNA
ggcccttggcccatccccaggagcc

SEQ ID NO: 128 - DNA, 25 bp, Homo sapiens
  source 1..25: mol_type = genomic DNA
ggcccttggcccatccccaggagcc

SEQ ID NO: 129 - RNA, 25 nt, synthetic construct
  source 1..25: mol_type = other RNA
gggccgagatcttcgaggcggggcc

SEQ ID NO: 130 - DNA, 25 bp, Homo sapiens
  source 1..25: mol_type = genomic DNA
gggccgagatcttcgaggcggggcc

SEQ ID NO: 131 - RNA, 25 nt, synthetic construct
  source 1..25: mol_type = other RNA
gggcgaggctcctggggatgggcca

SEQ ID NO: 132 - DNA, 25 bp, Homo sapiens
  source 1..25: mol_type = genomic DNA
gggcgaggctcctggggatgggcca

SEQ ID NO: 133 - RNA, 25 nt, synthetic construct
  source 1..25: mol_type = other RNA
ggggcccatgcctcctcttcttcct

SEQ ID NO: 134 - DNA, 25 bp, Homo sapiens
  source 1..25: mol_type = genomic DNA
ggggcccatgcctcctcttcttcct

SEQ ID NO: 135 - RNA, 25 nt, synthetic construct
  source 1..25: mol_type = other RNA
ggggttcaaggaagaagaggaggca

SEQ ID NO: 136 - DNA, 25 bp, Homo sapiens
  source 1..25: mol_type = genomic DNA
ggggttcaaggaagaagaggaggca

SEQ ID NO: 137 - RNA, 25 nt, synthetic construct
  source 1..25: mol_type = other RNA
ggttcaaggaagaagaggaggcatg

SEQ ID NO: 138 - DNA, 25 bp, Homo sapiens
  source 1..25: mol_type = genomic DNA
ggttcaaggaagaagaggaggcatg

SEQ ID NO: 139 - RNA, 25 nt, synthetic construct
  source 1..25: mol_type = other RNA
tcaaggaagaagaggaggcatgggc

SEQ ID NO: 140 - DNA, 25 bp, Homo sapiens
  source 1..25: mol_type = genomic DNA
tcaaggaagaagaggaggcatgggc

SEQ ID NO: 141 - RNA, 25 nt, synthetic construct
  source 1..25: mol_type = other RNA
tccagctgggcgaggctcctgggga

SEQ ID NO: 142 - DNA, 25 bp, Homo sapiens
  source 1..25: mol_type = genomic DNA
tccagctgggcgaggctcctgggga

SEQ ID NO: 143 - RNA, 25 nt, synthetic construct
  source 1..25: mol_type = other RNA
tcgaggcggggcccatgcctcctct

SEQ ID NO: 144 - DNA, 25 bp, Homo sapiens
  source 1..25: mol_type = genomic DNA
tcgaggcggggcccatgcctcctct

SEQ ID NO: 145 - RNA, 25 nt, synthetic construct
  source 1..25: mol_type = other RNA
tgggtgcagccctccagctgggcga

SEQ ID NO: 146 - DNA, 25 bp, Homo sapiens
  source 1..25: mol_type = genomic DNA
tgggtgcagccctccagctgggcga

SEQ ID NO: 147 - RNA, 25 nt, synthetic construct
  source 1..25: mol_type = other RNA
ttccagggccgagatcttcgaggcg

SEQ ID NO: 148 - DNA, 25 bp, Homo sapiens
  source 1..25: mol_type = genomic DNA
ttccagggccgagatcttcgaggcg

SEQ ID NO: 149 - RNA, 25 nt, synthetic construct
  source 1..25: mol_type = other RNA
aagcctcagacctgctgggggcccg

SEQ ID NO: 150 - DNA, 25 bp, Homo sapiens
  source 1..25: mol_type = genomic DNA
aagcctcagacctgctgggggcccg

SEQ ID NO: 151 - RNA, 25 nt, synthetic construct
  source 1..25: mol_type = other RNA
cttgccaggcctggggttgggcatc

SEQ ID NO: 152 - DNA, 25 bp, Homo sapiens
  source 1..25: mol_type = genomic DNA
cttgccaggcctggggttgggcatc

SEQ ID NO: 153 - RNA, 24 nt, synthetic construct
  source 1..24: mol_type = other RNA
ttgccaggcctggggttgggcatc

SEQ ID NO: 154 - DNA, 24 bp, Homo sapiens
  source 1..24: mol_type = genomic DNA
ttgccaggcctggggttgggcatc

SEQ ID NO: 155 - RNA, 23 nt, synthetic construct
  source 1..23: mol_type = other RNA
tgccaggcctggggttgggcatc

SEQ ID NO: 156 - DNA, 23 bp, Homo sapiens
  source 1..23: mol_type = genomic DNA
tgccaggcctggggttgggcatc

SEQ ID NO: 157 - RNA, 22 nt, synthetic construct
  source 1..22: mol_type = other RNA
gccaggcctggggttgggcatc

SEQ ID NO: 158 - DNA, 22 bp, Homo sapiens
  source 1..22: mol_type = genomic DNA
gccaggcctggggttgggcatc

SEQ ID NO: 159 - RNA, 25 nt, synthetic construct
  source 1..25: mol_type = other RNA
agcaggtctgaggctttgggtgcag

SEQ ID NO: 160 - DNA, 25 bp, Homo sapiens
  source 1..25: mol_type = genomic DNA
agcaggtctgaggctttgggtgcag

SEQ ID NO: 161 - RNA, 24 nt, synthetic construct
  source 1..24: mol_type = other RNA
gcaggtctgaggctttgggtgcag

SEQ ID NO: 162 - DNA, 24 bp, Homo sapiens
  source 1..24: mol_type = genomic DNA
gcaggtctgaggctttgggtgcag

SEQ ID NO: 163 - RNA, 23 nt, synthetic construct
  source 1..23: mol_type = other RNA
caggtctgaggctttgggtgcag

SEQ ID NO: 164 - DNA, 23 bp, Homo sapiens
  source 1..23: mol_type = genomic DNA
caggtctgaggctttgggtgcag

SEQ ID NO: 165 - RNA, 22 nt, synthetic construct
  source 1..22: mol_type = other RNA
aggtctgaggctttgggtgcag

SEQ ID NO: 166 - DNA, 22 bp, Homo sapiens
  source 1..22: mol_type = genomic DNA
aggtctgaggctttgggtgcag

SEQ ID NO: 167 - RNA, 25 nt, synthetic construct
  source 1..25: mol_type = other RNA
tctcggccctggaaggttccccctg

SEQ ID NO: 168 - DNA, 25 bp, Homo sapiens
  source 1..25: mol_type = genomic DNA
tctcggccctggaaggttccccctg

SEQ ID NO: 169 - RNA, 24 nt, synthetic construct
  source 1..24: mol_type = other RNA
ctcggccctggaaggttccccctg

SEQ ID NO: 170 - DNA, 24 bp, Homo sapiens
  source 1..24: mol_type = genomic DNA
ctcggccctggaaggttccccctg

SEQ ID NO: 171 - RNA, 23 nt, synthetic construct
  source 1..23: mol_type = other RNA
tcggccctggaaggttccccctg

SEQ ID NO: 172 - DNA, 23 bp, Homo sapiens
  source 1..23: mol_type = genomic DNA
tcggccctggaaggttccccctg

SEQ ID NO: 173 - RNA, 22 nt, synthetic construct
  source 1..22: mol_type = other RNA
cggccctggaaggttccccctg

SEQ ID NO: 174 - DNA, 22 bp, Homo sapiens
  source 1..22: mol_type = genomic DNA
cggccctggaaggttccccctg

SEQ ID NO: 175 - RNA, 25 nt, synthetic construct
  source 1..25: mol_type = other RNA
cctcgaagatctcggccctggaagg

SEQ ID NO: 176 - DNA, 25 bp, Homo sapiens
  source 1..25: mol_type = genomic DNA
cctcgaagatctcggccctggaagg

SEQ ID NO: 177 - RNA, 24 nt, synthetic construct
  source 1..24: mol_type = other RNA
ctcgaagatctcggccctggaagg

SEQ ID NO: 178 - DNA, 24 bp, Homo sapiens
  source 1..24: mol_type = genomic DNA
ctcgaagatctcggccctggaagg

SEQ ID NO: 179 - RNA, 23 nt, synthetic construct
  source 1..23: mol_type = other RNA
tcgaagatctcggccctggaagg

SEQ ID NO: 180 - DNA, 23 bp, Homo sapiens
  source 1..23: mol_type = genomic DNA
tcgaagatctcggccctggaagg

SEQ ID NO: 181 - RNA, 22 nt, synthetic construct
  source 1..22: mol_type = other RNA
cgaagatctcggccctggaagg

SEQ ID NO: 182 - DNA, 22 bp, Homo sapiens
  source 1..22: mol_type = genomic DNA
cgaagatctcggccctggaagg

SEQ ID NO: 183 - RNA, 24 nt, synthetic construct
  source 1..24: mol_type = other RNA
ctcggccctggaaggttccccctg

SEQ ID NO: 184 - DNA, 24 bp, Homo sapiens
  source 1..24: mol_type = genomic DNA
ctcggccctggaaggttccccctg

SEQ ID NO: 185 - RNA, 25 nt, synthetic construct
  source 1..25: mol_type = other RNA
cttgccaggcctggggttgggcatc

SEQ ID NO: 186 - DNA, 25 bp, Homo sapiens
  source 1..25: mol_type = genomic DNA
cttgccaggcctggggttgggcatc

SEQ ID NO: 187 - RNA, 25 nt, synthetic construct
  source 1..25: mol_type = other RNA
agcaggtctgaggctttgggtgcag

SEQ ID NO: 188 - DNA, 25 bp, Homo sapiens
  source 1..25: mol_type = genomic DNA
agcaggtctgaggctttgggtgcag

SEQ ID NO: 189 - RNA, 25 nt, synthetic construct
  source 1..25: mol_type = other RNA
tctcggccctggaaggttccccctg

SEQ ID NO: 190 - DNA, 25 bp, Homo sapiens
  source 1..25: mol_type = genomic DNA
tctcggccctggaaggttccccctg

SEQ ID NO: 191 - RNA, 25 nt, synthetic construct
  source 1..25: mol_type = other RNA
cctcgaagatctcggccctggaagg

SEQ ID NO: 192 - DNA, 25 bp, Homo sapiens
  source 1..25: mol_type = genomic DNA
cctcgaagatctcggccctggaagg

SEQ ID NO: 193 - RNA, 25 nt, synthetic construct
  source 1..25: mol_type = other RNA
ggggttcaaggaagaagaggaggca

SEQ ID NO: 194 - DNA, 25 bp, Homo sapiens
  source 1..25: mol_type = genomic DNA
ggggttcaaggaagaagaggaggca

SEQ ID NO: 195 - RNA, 24 nt, synthetic construct
  source 1..24: mol_type = other RNA
gggttcaaggaagaagaggaggca

SEQ ID NO: 196 - DNA, 24 bp, Homo sapiens
  source 1..24: mol_type = genomic DNA
gggttcaaggaagaagaggaggca

SEQ ID NO: 197 - RNA, 23 nt, synthetic construct
  source 1..23: mol_type = other RNA
ggttcaaggaagaagaggaggca

SEQ ID NO: 198 - DNA, 23 bp, Homo sapiens
  source 1..23: mol_type = genomic DNA
ggttcaaggaagaagaggaggca

SEQ ID NO: 199 - RNA, 24 nt, synthetic construct
  source 1..24: mol_type = other RNA
ttgccaggcctggggttgggcatc

SEQ ID NO: 200 - DNA, 24 bp, Homo sapiens
  source 1..24: mol_type = genomic DNA
ttgccaggcctggggttgggcatc

SEQ ID NO: 201 - RNA, 23 nt, synthetic construct
  source 1..23: mol_type = other RNA
tgccaggcctggggttgggcatc

SEQ ID NO: 202 - DNA, 23 bp, Homo sapiens
  source 1..23: mol_type = genomic DNA
tgccaggcctggggttgggcatc

SEQ ID NO: 203 - RNA, 24 nt, synthetic construct
  source 1..24: mol_type = other RNA
gcaggtctgaggctttgggtgcag

SEQ ID NO: 204 - DNA, 24 bp, Homo sapiens
  source 1..24: mol_type = genomic DNA
gcaggtctgaggctttgggtgcag

SEQ ID NO: 205 - RNA, 23 nt, synthetic construct
  source 1..23: mol_type = other RNA
caggtctgaggctttgggtgcag

SEQ ID NO: 206 - DNA, 23 bp, Homo sapiens
  source 1..23: mol_type = genomic DNA
caggtctgaggctttgggtgcag

SEQ ID NO: 207 - RNA, 24 nt, synthetic construct
  source 1..24: mol_type = other RNA
ctcggccctggaaggttccccctg

SEQ ID NO: 208 - DNA, 24 bp, Homo sapiens
  source 1..24: mol_type = genomic DNA
ctcggccctggaaggttccccctg

SEQ ID NO: 209 - RNA, 23 nt, synthetic construct
  source 1..23: mol_type = other RNA
tcggccctggaaggttccccctg

SEQ ID NO: 210 - DNA, 23 bp, Homo sapiens
  source 1..23: mol_type = genomic DNA
tcggccctggaaggttccccctg

SEQ ID NO: 211 - RNA, 24 nt, synthetic construct
  source 1..24: mol_type = other RNA
ctcgaagatctcggccctggaagg

SEQ ID NO: 212 - DNA, 24 bp, Homo sapiens
  source 1..24: mol_type = genomic DNA
ctcgaagatctcggccctggaagg

SEQ ID NO: 213 - RNA, 23 nt, synthetic construct
  source 1..23: mol_type = other RNA
tcgaagatctcggccctggaagg

SEQ ID NO: 214 - DNA, 23 bp, Homo sapiens
  source 1..23: mol_type = genomic DNA
tcgaagatctcggccctggaagg

SEQ ID NO: 215 - DNA, 53 bp, synthetic construct
  source 1..53: mol_type = other DNA
tcgtcggcagcgtcagatgtgtataagagacaggctttgaccagaggagtgtc

SEQ ID NO: 216 - DNA, 54 bp, synthetic construct
  source 1..54: mol_type = other DNA
gtctcgtgggctcggagatgtgtataagagacagtcaaggaagaagaggaggca

SEQ ID NO: 217 - DNA, 53 bp, synthetic construct
  source 1..53: mol_type = other DNA
tcgtcggcagcgtcagatgtgtataagagacagcctattgtctacgcagcctg

SEQ ID NO: 218 - DNA, 54 bp, synthetic construct
  source 1..54: mol_type = other DNA
gtctcgtgggctcggagatgtgtataagagacagccagtgccacagtaaaggtc

SEQ ID NO: 219 - DNA, 53 bp, synthetic construct; identical to SEQ ID NO: 215
  source 1..53: mol_type = other DNA

SEQ ID NO: 220 - DNA, 54 bp, synthetic construct; identical to SEQ ID NO: 218
  source 1..54: mol_type = other DNA

SEQ ID NO: 221 - DNA, 22 bp, Homo sapiens
  source 1..22: mol_type = genomic DNA
tgccaggccagggcttgggaac

SEQ ID NO: 222 - DNA, 23 bp, Homo sapiens
  source 1..23: mol_type = genomic DNA
tgccaggcctgaggttctgcatt

SEQ ID NO: 223 - DNA, 23 bp, Homo sapiens
  source 1..23: mol_type = genomic DNA
ggcctggcctggggatgggcatg

SEQ ID NO: 224 - DNA, 23 bp, Homo sapiens
  source 1..23: mol_type = genomic DNA
ggccaggcctgggtttggacacc

SEQ ID NO: 225 - DNA, 23 bp, Homo sapiens
  source 1..23: mol_type = genomic DNA
tgccaggcctggatttggccatt

SEQ ID NO: 226 - DNA, 22 bp, Homo sapiens
  source 1..22: mol_type = genomic DNA
ggccaggcctgggcttggcaaa

SEQ ID NO: 227 - DNA, 24 bp, Homo sapiens
  source 1..24: mol_type = genomic DNA
tgggaggcctgaggttgggcattc

SEQ ID NO: 228 - DNA, 24 bp, Homo sapiens
  source 1..24: mol_type = genomic DNA
tgccaggcctggtgatgggcgctg

SEQ ID NO: 229 - DNA, 23 bp, Homo sapiens
  source 1..23: mol_type = genomic DNA
tgccaggcatggggctgggctcc

SEQ ID NO: 230 - DNA, 24 bp, Homo sapiens
  source 1..24: mol_type = genomic DNA
tgccaggcctggggaggggtgaac

SEQ ID NO: 231 - DNA, 24 bp, Homo sapiens
  source 1..24: mol_type = genomic DNA
tgccaggcctgggcttgagtcctt

SEQ ID NO: 232 - DNA, 23 bp, Homo sapiens
  source 1..23: mol_type = genomic DNA
tgccaggcctggggtgggccctg

SEQ ID NO: 233 - DNA, 22 bp, Homo sapiens
  source 1..22: mol_type = genomic DNA
ttccaggcctgggggtggggcc

SEQ ID NO: 234 - DNA, 24 bp, Homo sapiens
  source 1..24: mol_type = genomic DNA
tgccaggcccggtgctgggcactt

SEQ ID NO: 235 - DNA, 21 bp, Homo sapiens
  source 1..21: mol_type = genomic DNA
tgccaggcctggggtccccac

SEQ ID NO: 236 - DNA, 25 bp, Homo sapiens
  source 1..25: mol_type = genomic DNA
agcccgggctggggttgggcactac

SEQ ID NO: 237 - DNA, 24 bp, Homo sapiens
  source 1..24: mol_type = genomic DNA
tgccaggtgtggggttgggcgctg

SEQ ID NO: 238 - DNA, 23 bp, Homo sapiens
  source 1..23: mol_type = genomic DNA
agccagccctggggtggggcagg

SEQ ID NO: 239 - DNA, 29 bp, Homo sapiens
  source 1..29: mol_type = genomic DNA
agccaggcgtggtggtgggcatttgtaat

SEQ ID NO: 240 - DNA, 23 bp, Homo sapiens
  source 1..23: mol_type = genomic DNA
tttcaggcctagggttgggcaca

SEQ ID NO: 241 - DNA, 23 bp, Homo sapiens
  source 1..23: mol_type = genomic DNA
caggaggcctggggttgggcatg

SEQ ID NO: 242 - DNA, 23 bp, Homo sapiens
  source 1..23: mol_type = genomic DNA
gaccaggcctgggtttggacacc

SEQ ID NO: 243 - DNA, 23 bp, Homo sapiens
  source 1..23: mol_type = genomic DNA
tgccaggactggggttggatgtt

SEQ ID NO: 244 - DNA, 23 bp, Homo sapiens
  source 1..23: mol_type = genomic DNA
ggccaggcctggggttcagcagg

SEQ ID NO: 245 - DNA, 23 bp, Homo sapiens
  source 1..23: mol_type = genomic DNA
tgccaggcctgggattggcgggc

SEQ ID NO: 246 - DNA, 23 bp, Homo sapiens
  source 1..23: mol_type = genomic DNA
acccaggcctggggttgggatcc

SEQ ID NO: 247 - DNA, 23 bp, Homo sapiens
  source 1..23: mol_type = genomic DNA
ggccatgcctggggttggggggc

SEQ ID NO: 248 - DNA, 23 bp, Homo sapiens
  source 1..23: mol_type = genomic DNA
ggcgaggcctgggggtgggcacg

SEQ ID NO: 249 - DNA, 23 bp, Homo sapiens
  source 1..23: mol_type = genomic DNA
ggcccggcctggggatgggcacg

SEQ ID NO: 250 - DNA, 29 bp, Homo sapiens
  source 1..29: mol_type = genomic DNA
agccaggcgtggtggtgggcatctgtaat

SEQ ID NO: 251 - DNA, 22 bp, Homo sapiens
  source 1..22: mol_type = genomic DNA
ctccagtcctggggttgggccc

SEQ ID NO: 252 - DNA, 22 bp, Homo sapiens
  source 1..22: mol_type = genomic DNA
ctacaggcctggggttgggaac

SEQ ID NO: 253 - DNA, 22 bp, Homo sapiens
  source 1..22: mol_type = genomic DNA
ttggtggcctggggttgggctc

SEQ ID NO: 254 - DNA, 25 bp, Homo sapiens
  source 1..25: mol_type = genomic DNA
ttccaggcctggggttggcagcatc

SEQ ID NO: 255 - DNA, 24 bp, Homo sapiens
  source 1..24: mol_type = genomic DNA
ggccaggcctggggctgggacctc

SEQ ID NO: 256 - DNA, 24 bp, Homo sapiens
  source 1..24: mol_type = genomic DNA
agcgaggcctggggttgggccagc

SEQ ID NO: 257 - DNA, 24 bp, Homo sapiens
  source 1..24: mol_type = genomic DNA
tgtcaggcctggggttgggtaagc

SEQ ID NO: 258 - DNA, 22 bp, Homo sapiens
  source 1..22: mol_type = genomic DNA
aaggtctgaggctttgtgtcag

SEQ ID NO: 259 - DNA, 24 bp, Homo sapiens
  source 1..24: mol_type = genomic DNA
caggtgtggggctttggctgccag

SEQ ID NO: 260 - DNA, 22 bp, Homo sapiens
  source 1..22: mol_type = genomic DNA
caggtctgagcctttggtcctg

SEQ ID NO: 261 - DNA, 24 bp, Homo sapiens
  source 1..24: mol_type = genomic DNA
caggtctgagggtttggctgctaa

SEQ ID NO: 262 - DNA, 23 bp, Homo sapiens
  source 1..23: mol_type = genomic DNA
gaggtctgagtctttgactgcag

SEQ ID NO: 263 - DNA, 22 bp, Homo sapiens
  source 1..22: mol_type = genomic DNA
catgctgaggccttgggtgcag

SEQ ID NO: 264 - DNA, 22 bp, Homo sapiens
  source 1..22: mol_type = genomic DNA
tagttactgaggctttgggtgg

SEQ ID NO: 265 - DNA, 22 bp, Homo sapiens
  source 1..22: mol_type = genomic DNA
caggactggggctttgggtgac

SEQ ID NO: 266 - DNA, 23 bp, Homo sapiens
  source 1..23: mol_type = genomic DNA
caggtgtgaagctttgggtacct

SEQ ID NO: 267 - DNA, 24 bp, Homo sapiens
  source 1..24: mol_type = genomic DNA
caggtctgaggatttggggttctt

SEQ ID NO: 268 - DNA, 23 bp, Homo sapiens
  source 1..23: mol_type = genomic DNA
gaggtctgaggatttgggtctac

SEQ ID NO: 269 - DNA, 23 bp, Homo sapiens
  source 1..23: mol_type = genomic DNA
caggtctgtggccttggatgctg

SEQ ID NO: 270 - DNA, 23 bp, Homo sapiens
  source 1..23: mol_type = genomic DNA
atggtcagaggctttggctgcac

SEQ ID NO: 271 - DNA, 23 bp, Homo sapiens
  source 1..23: mol_type = genomic DNA
taggtctgtggctttgggggctc

SEQ ID NO: 272 - DNA, 23 bp, Homo sapiens
  source 1..23: mol_type = genomic DNA
caggtctgaggctttcggtttgt

SEQ ID NO: 273 - DNA, 23 bp, Homo sapiens
  source 1..23: mol_type = genomic DNA
tcgaagagctcggccgtggtagc

SEQ ID NO: 274 - DNA, 25 bp, Homo sapiens
  source 1..25: mol_type = genomic DNA
tctgggccctggaaggctgaccctg

SEQ ID NO: 275 - DNA, 25 bp, Homo sapiens
  source 1..25: mol_type = genomic DNA
tctgggtactggaagtttccacctg

SEQ ID NO: 276 - DNA, 25 bp, Homo sapiens
  source 1..25: mol_type = genomic DNA
cctgggccctgggagcttccccttg

SEQ ID NO: 277 - DNA, 24 bp, Homo sapiens
  source 1..24: mol_type = genomic DNA
tctccactctggaaggttcccctg

SEQ ID NO: 278 - DNA, 25 bp, Homo sapiens
  source 1..25: mol_type = genomic DNA
cctgggccctggaaggttctgtctg

SEQ ID NO: 279 - DNA, 26 bp, Homo sapiens
  source 1..26: mol_type = genomic DNA
tctcagccctgcaaggttcccgccgg

SEQ ID NO: 280 - DNA, 23 bp, Homo sapiens
  source 1..23: mol_type = genomic DNA
ggtacaaggaagtagaggagaca

SEQ ID NO: 281 - DNA, 23 bp, Homo sapiens
  source 1..23: mol_type = genomic DNA
ccttgaaggaagaggaggaggca

SEQ ID NO: 282 - DNA, 25 bp, Homo sapiens
  source 1..25: mol_type = genomic DNA
gcttcaagtggaagaagaggaggca

SEQ ID NO: 283 - DNA, 24 bp, Homo sapiens
  source 1..24: mol_type = genomic DNA
gagtcagaggaagaagaggaggct

SEQ ID NO: 284 - DNA, 24 bp, Homo sapiens
  source 1..24: mol_type = genomic DNA
ggttcaaggaaagagaggagagca

SEQ ID NO: 285 - DNA, 23 bp, Homo sapiens
  source 1..23: mol_type = genomic DNA
tgttccaggaggaagaggaggcc

SEQ ID NO: 286 - DNA, 23 bp, Homo sapiens
  source 1..23: mol_type = genomic DNA
gctgtaaggaagaggaggaggca

SEQ ID NO: 287 - DNA, 22 bp, Homo sapiens
  source 1..22: mol_type = genomic DNA
aggaaaaggaagaagaggagga

SEQ ID NO: 288 - DNA, 23 bp, Homo sapiens
  source 1..23: mol_type = genomic DNA
atttcaaggaggaagagcaggca

SEQ ID NO: 289 - DNA, 23 bp, Homo sapiens
  source 1..23: mol_type = genomic DNA
gctttaaggaagaagagaaggca

SEQ ID NO: 290 - DNA, 22 bp, Homo sapiens
  source 1..22: mol_type = genomic DNA
aattcaaggaagaagaggtgca

SEQ ID NO: 291 - DNA, 23 bp, Homo sapiens
  source 1..23: mol_type = genomic DNA
tgtttaaggaagaagaggaaaaa

SEQ ID NO: 292 - DNA, 23 bp, Homo sapiens
  source 1..23: mol_type = genomic DNA
tgttcaagaaaaaacaggaggca

SEQ ID NO: 293 - DNA, 22 bp, Homo sapiens
  source 1..22: mol_type = genomic DNA
ggttcatggaagaagagatgaa

SEQ ID NO: 294 - DNA, 24 bp, Homo sapiens
  source 1..24: mol_type = genomic DNA
tcttccaggaagaagaggcggcga

SEQ ID NO: 295 - DNA, 24 bp, Homo sapiens
  source 1..24: mol_type = genomic DNA
ctttcaagaaagcagaggaggcca

SEQ ID NO: 296 - DNA, 24 bp, Homo sapiens
  source 1..24: mol_type = genomic DNA
tgttcaaggaacaagaggaaggcc

SEQ ID NO: 297 - DNA, 21 bp, Homo sapiens
  source 1..21: mol_type = genomic DNA
ttttcaaggaagaagatgaga

SEQ ID NO: 298 - DNA, 25 bp, Homo sapiens
  source 1..25: mol_type = genomic DNA
ggaagaagaggaagaagaggaggca

SEQ ID NO: 299 - DNA, 23 bp, Homo sapiens
  source 1..23: mol_type = genomic DNA
acatcaaggaagaggaggaggcc

SEQ ID NO: 300 - DNA, 23 bp, Homo sapiens
  source 1..23: mol_type = genomic DNA
gcttcaaggaagcagaggataga

SEQ ID NO: 301 - DNA, 23 bp, Homo sapiens
  source 1..23: mol_type = genomic DNA
atttcaaggaagaagaggcccca

SEQ ID NO: 302 - DNA, 23 bp, Homo sapiens
  source 1..23: mol_type = genomic DNA
tgttcaaggtagaagaggatgaa

SEQ ID NO: 303 - DNA, 23 bp, Homo sapiens
  source 1..23: mol_type = genomic DNA
ctttcaaggaataagtggaggca

SEQ ID NO: 304 - DNA, 23 bp, Homo sapiens
  source 1..23: mol_type = genomic DNA
ggaaggaggaagaagagaaggca

SEQ ID NO: 305 - DNA, 23 bp, Homo sapiens
  source 1..23: mol_type = genomic DNA
ctctcaaggaagcagaggaggaa

SEQ ID NO: 306 - DNA, 23 bp, Homo sapiens
  source 1..23: mol_type = genomic DNA
cgttcaagcaaggagaggagaaa

SEQ ID NO: 307 - DNA, 23 bp, Homo sapiens
  source 1..23: mol_type = genomic DNA
gagacaaggagggagaggaggca

SEQ ID NO: 308 - DNA, 23 bp, Homo sapiens
  source 1..23: mol_type = genomic DNA
gactcaaggaaaaaggggaggcg

SEQ ID NO: 309 - DNA, 23 bp, Homo sapiens
  source 1..23: mol_type = genomic DNA
ggatcaaggaagaagatgagaaa

SEQ ID NO: 310 - DNA, 24 bp, Homo sapiens
  source 1..24: mol_type = genomic DNA
agggtttatgggagaagaggagga

SEQ ID NO: 311 - DNA, 25 bp, Homo sapiens
  source 1..25: mol_type = genomic DNA
tgggtacaaggaagtagaggagaca

SEQ ID NO: 312 - DNA, 24 bp, Homo sapiens
  source 1..24: mol_type = genomic DNA
gggcttcagggagggagaggagga

SEQ ID NO: 313 - DNA, 25 bp, Homo sapiens
  source 1..25: mol_type = genomic DNA
ggccttgaaggaagaggaggaggca

SEQ ID NO: 314 - DNA, 25 bp, Homo sapiens
  source 1..25: mol_type = genomic DNA
ggggttcacggtagagcaggaggct

SEQ ID NO: 315 - DNA, 25 bp, Homo sapiens
  source 1..25: mol_type = genomic DNA
tggcttcagggaagaagagcaggaa

SEQ ID NO: 316 - DNA, 27 bp, Homo sapiens
  source 1..27: mol_type = genomic DNA
gtgcttcaagtggaagaagaggaggca

SEQ ID NO: 317 - DNA, 27 bp, Homo sapiens
  source 1..27: mol_type = genomic DNA
ggggttcaagggagaaggctggaggca

SEQ ID NO: 318 - DNA, 26 bp, Homo sapiens
  source 1..26: mol_type = genomic DNA
ggggttaaaggaagaaaaggatgaca

SEQ ID NO: 319 - DNA, 25 bp, Homo sapiens
  source 1..25: mol_type = genomic DNA
tggggtgaagaaaggagaggaggca

SEQ ID NO: 320 - DNA, 25 bp, Homo sapiens
  source 1..25: mol_type = genomic DNA
gggcttgcagaaagaagaggaggca

SEQ ID NO: 321 - DNA, 25 bp, Homo sapiens
  source 1..25: mol_type = genomic DNA
ggagtcagaggaagaagaggaggct

SEQ ID NO: 322 - DNA, 26 bp, Homo sapiens
  source 1..26: mol_type = genomic DNA
gaggttcaaggaaagagaggagagca

SEQ ID NO: 323 - DNA, 25 bp, Homo sapiens
  source 1..25: mol_type = genomic DNA
tgtgttccaggaggaagaggaggcc

SEQ ID NO: 324 - DNA, 25 bp, Homo sapiens
  source 1..25: mol_type = genomic DNA
gagctgtaaggaagaggaggaggca

SEQ ID NO: 325 - DNA, 24 bp, Homo sapiens
  source 1..24: mol_type = genomic DNA
ggaggaaaaggaagaagaggagga

SEQ ID NO: 326 - DNA, 25 bp, Homo sapiens
  source 1..25: mol_type = genomic DNA
tgatttcaaggaggaagagcaggca

SEQ ID NO: 327 - DNA, 25 bp, Homo sapiens
  source 1..25: mol_type = genomic DNA
gggtttaatgggagaagaggaggca

SEQ ID NO: 328 - DNA, 25 bp, Homo sapiens
  source 1..25: mol_type = genomic DNA
atgctttaaggaagaagagaaggca

SEQ ID NO: 329 - DNA, 20 bp, synthetic construct
  source 1..20: mol_type = other DNA
ggggaggattacacagcatg

SEQ ID NO: 330 - DNA, 20 bp, synthetic construct
  source 1..20: mol_type = other DNA
ggttcagtctggaatgcagt

SEQ ID NO: 331 - DNA, 19 bp, synthetic construct
  source 1..19: mol_type = other DNA
aaaccctgcaacagtcccg

SEQ ID NO: 332 - DNA, 20 bp, synthetic construct
  source 1..20: mol_type = other DNA
gtgtctgtgtggagactggg

SEQ ID NO: 333 - DNA, 20 bp, synthetic construct
  source 1..20: mol_type = other DNA
caatcagcaagaccctgtgt

SEQ ID NO: 334 - DNA, 18 bp, synthetic construct
  source 1..18: mol_type = other DNA
agtggactctggtagccc

SEQ ID NO: 335 - DNA, 20 bp, synthetic construct
  source 1..20: mol_type = other DNA
ttctgctcttattgcccagg

SEQ ID NO: 336 - DNA, 20 bp, synthetic construct
  source 1..20: mol_type = other DNA
tcccaccacacccctcaaac

SEQ ID NO: 337 - DNA, 20 bp, synthetic construct
  source 1..20: mol_type = other DNA
gctgaactaagaggccctgg

SEQ ID NO: 338 - DNA, 20 bp, synthetic construct
  source 1..20: mol_type = other DNA
cattgactccggaagccctt

SEQ ID NO: 339 - DNA, 20 bp, synthetic construct
  source 1..20: mol_type = other DNA
tggcatcctttctgcaggag

SEQ ID NO: 340 - DNA, 20 bp, synthetic construct
  source 1..20: mol_type = other DNA
cttagctgagccctgccttt

SEQ ID NO: 341 - DNA, 20 bp, synthetic construct
  source 1..20: mol_type = other DNA
gtacctggggtttggggttt

SEQ ID NO: 342 - DNA, 20 bp, synthetic construct
  source 1..20: mol_type = other DNA
tctcccgactgtaggatgca

SEQ ID NO: 343 - DNA, 20 bp, synthetic construct
  source 1..20: mol_type = other DNA
taggacccctctcactgctc

SEQ ID NO: 344 - DNA, 20 bp, synthetic construct
  source 1..20: mol_type = other DNA
ttggctgcctttgcttcaac

SEQ ID NO: 345 - DNA, 20 bp, synthetic construct
  source 1..20: mol_type = other DNA
tgtgaggctggaagaggagt

SEQ ID NO: 346 - DNA, 20 bp, synthetic construct
  source 1..20: mol_type = other DNA
attccagctccaggcaagtc

SEQ ID NO: 347 - DNA, 21 bp, synthetic construct
  source 1..21: mol_type = other DNA
ggtgtgatcccagctcattgc

SEQ ID NO: 348 - DNA, 20 bp, synthetic construct
  source 1..20: mol_type = other DNA
agaggggtctgctagtcctg

SEQ ID NO: 349 - DNA, 20 bp, synthetic construct
  source 1..20: mol_type = other DNA
atgtgttctcagccctctgc

SEQ ID NO: 350 - DNA, 20 bp, synthetic construct
  source 1..20: mol_type = other DNA
tctctcagccttggtccaga

SEQ ID NO: 351 - DNA, 20 bp, synthetic construct
  source 1..20: mol_type = other DNA
ctgcctcgtcagtctttggt

SEQ ID NO: 352 - DNA, 20 bp, synthetic construct
  source 1..20: mol_type = other DNA
gtaccaggaggcagctaggc

SEQ ID NO: 353 - DNA, 20 bp, synthetic construct
  source 1..20: mol_type = other DNA
ccactctgacctctgtgctg

SEQ ID NO: 354 - DNA, 20 bp, synthetic construct
  source 1..20: mol_type = other DNA
catagcctcatggtggaccc

SEQ ID NO: 355 - DNA, 20 bp, synthetic construct
  source 1..20: mol_type = other DNA
ggaagaggctccgtatgggg

SEQ ID NO: 356 - DNA, 20 bp, synthetic construct
  source 1..20: mol_type = other DNA
ggtttgggatggagactggg

SEQ ID NO: 357 - DNA, 19 bp, synthetic construct
  source 1..19: mol_type = other DNA
aaaccctgcaacagtcccg

SEQ ID NO: 358 - DNA, 20 bp, synthetic construct
  source 1..20: mol_type = other DNA
tcttggctgactgcaacctc

SEQ ID NO: 359 - DNA, 20 bp, synthetic construct
  source 1..20: mol_type = other DNA
cgatcggggttagttgctgt

SEQ ID NO: 360 - DNA, 20 bp, synthetic construct
  source 1..20: mol_type = other DNA
tggggcagtaaaggcaaact

SEQ ID NO: 361 - DNA, 20 bp, synthetic construct
  source 1..20: mol_type = other DNA
cctcaggtttgactgacccc

SEQ ID NO: 362 - DNA, 20 bp, synthetic construct
  source 1..20: mol_type = other DNA
cctctccagctgtgaacctg

SEQ ID NO: 363 - DNA, 20 bp, synthetic construct
  source 1..20: mol_type = other DNA
gggacagaggccaaggactg

SEQ ID NO: 364 - DNA, 20 bp, synthetic construct
  source 1..20: mol_type = other DNA
ctgcccttccctgtcatctg

SEQ ID NO: 365 - DNA, 20 bp, synthetic construct
  source 1..20: mol_type = other DNA
gatccctttgctctgggctt

SEQ ID NO: 366 - DNA, 20 bp, synthetic construct
  source 1..20: mol_type = other DNA
cagtttcccagacctcccac

SEQ ID NO: 367 - DNA, 20 bp, synthetic construct
  source 1..20: mol_type = other DNA
ctgacccccagacccataaa

SEQ ID NO: 368 - DNA, 20 bp, synthetic construct
  source 1..20: mol_type = other DNA
gcatctctctacaggtggcc

SEQ ID NO: 369 - DNA, 20 bp, synthetic construct
  source 1..20: mol_type = other DNA
gaagggcgagagggaagaac

SEQ ID NO: 370 - DNA, 20 bp, synthetic construct
  source 1..20: mol_type = other DNA
tcaggacagaccctaggcaa

SEQ ID NO: 371 - DNA, 20 bp, synthetic construct
  source 1..20: mol_type = other DNA
tgacaacagaacagggcgtt

SEQ ID NO: 372 - DNA, 20 bp, synthetic construct
  source 1..20: mol_type = other DNA
aagccaatgagatggggtgg

SEQ ID NO: 373 - DNA, 20 bp, synthetic construct
  source 1..20: mol_type = other DNA
ggtcattgcagcctcctctt

SEQ ID NO: 374 - DNA, 20 bp, synthetic construct
  source 1..20: mol_type = other DNA
tcaacaggactgcagtgagc

SEQ ID NO: 375 - DNA, 20 bp, synthetic construct
  source 1..20: mol_type = other DNA
gagaagggcctgcttccttt

SEQ ID NO: 376 - DNA, 20 bp, synthetic construct
  source 1..20: mol_type = other DNA
tgctcatctccagctcagca

SEQ ID NO: 377 - DNA, 20 bp, synthetic construct
  source 1..20: mol_type = other DNA
tggggtctcggaggagtgtt

SEQ ID NO: 378 - DNA, 20 bp, synthetic construct
  source 1..20: mol_type = other DNA
gggaagtggggctgtgttta

SEQ ID NO: 379 - DNA, 20 bp, synthetic construct
  source 1..20: mol_type = other DNA
gaggatggaatgggggcctg

SEQ ID NO: 380 - DNA, 20 bp, synthetic construct
  source 1..20: mol_type = other DNA
tcagacttccgtcattgcct

SEQ ID NO: 381 - DNA, 20 bp, synthetic construct
  source 1..20: mol_type = other DNA
cccttctgtttcgcacctct

SEQ ID NO: 382 - DNA, 20 bp, synthetic construct
  source 1..20: mol_type = other DNA
gacaccaacttcctccccag

SEQ ID NO: 383 - DNA, 20 bp, synthetic construct
  source 1..20: mol_type = other DNA
acagtgaaagttgtgggtgt

SEQ ID NO: 384 - DNA, 20 bp, synthetic construct
  source 1..20: mol_type = other DNA
ctgcctgagtggaagggttt

SEQ ID NO: 385 - DNA, 19 bp, synthetic construct
  source 1..19: mol_type = other DNA
ctgacctcatgatccgcct

SEQ ID NO: 386 - DNA, 20 bp, synthetic construct
  source 1..20: mol_type = other DNA
gcacttcctatgggactcac

SEQ ID NO: 387 - DNA, 20 bp, synthetic construct
  source 1..20: mol_type = other DNA
atcacaccaagctgacgagg

SEQ ID NO: 388 - DNA, 20 bp, synthetic construct
  source 1..20: mol_type = other DNA
tcgaagcccaattccagtcc

SEQ ID NO: 389 - DNA, 20 bp, synthetic construct
  source 1..20: mol_type = other DNA
gctgaaaggggactgctgat

SEQ ID NO: 390 - DNA, 20 bp, synthetic construct
  source 1..20: mol_type = other DNA
gcgtgttgctctatgagaga

SEQ ID NO: 391 - DNA, 20 bp, synthetic construct
  source 1..20: mol_type = other DNA
aaggagccgaaagtcacacc

SEQ ID NO: 392 - DNA, 20 bp, synthetic construct
  source 1..20: mol_type = other DNA
gtctgtagaaaggggcctgg

SEQ ID NO: 393 - DNA, 20 bp, synthetic construct
  source 1..20: mol_type = other DNA
ccaagactagctgcacactt

SEQ ID NO: 394 - DNA, 20 bp, synthetic construct
  source 1..20: mol_type = other DNA
tgtgtggagaggaactgagt

SEQ ID NO: 395 - DNA, 20 bp, synthetic construct
  source 1..20: mol_type = other DNA
tgtcatgcccagtccatagg

SEQ ID NO: 396 - DNA, 20 bp, synthetic construct
  source 1..20: mol_type = other DNA
gaactcagtactgggcatgg

SEQ ID NO: 397 - DNA, 22 bp, synthetic construct
  source 1..22: mol_type = other DNA
tggccatctagattcaccacag

SEQ ID NO: 398 - DNA, 20 bp, synthetic construct
  source 1..20: mol_type = other DNA
ttgcagcaaagcccccaaag

SEQ ID NO: 399 - DNA, 25 bp, synthetic construct
  source 1..25: mol_type = other DNA
aggccaggatatactaaatctctca

SEQ ID NO: 400 - DNA, 20 bp, synthetic construct
  source 1..20: mol_type = other DNA
attagctgggcatggcggca

SEQ ID NO: 401 - DNA, 20 bp, synthetic construct
  source 1..20: mol_type = other DNA
caaacgaattggaagggccg

SEQ ID NO: 402 - DNA, 19 bp, synthetic construct
  source 1..19: mol_type = other DNA
cctgcagggtatcagcaca

SEQ ID NO: 403 - DNA, 20 bp, synthetic construct
  source 1..20: mol_type = other DNA
tggcttcattctggctgctt

SEQ ID NO: 404 - DNA, 21 bp, synthetic construct
  source 1..21: mol_type = other DNA
catgctactgtgcctggccta

SEQ ID NO: 405 - DNA, 20 bp, synthetic construct
  source 1..20: mol_type = other DNA
gctgccacattttgaaggca

SEQ ID NO: 406 - DNA, 20 bp, synthetic construct
  source 1..20: mol_type = other DNA
ggccccgttcttcagtagca

SEQ ID NO: 407 - DNA, 20 bp, synthetic construct
  source 1..20: mol_type = other DNA
cggtctccacctcacttcac

SEQ ID NO: 408 - DNA, 20 bp, synthetic construct
  source 1..20: mol_type = other DNA
cacagagtcccacacccttc

SEQ ID NO: 409 - DNA, 20 bp, synthetic construct
  source 1..20: mol_type = other DNA
gtccctgggaatcacagcaa

SEQ ID NO: 410 - DNA, 20 bp, synthetic construct
  source 1..20: mol_type = other DNA
cagtggcacagaatcagggt

SEQ ID NO: 411 - DNA, 20 bp, synthetic construct
  source 1..20: mol_type = other DNA
gagtctccaaaccatgccct

SEQ ID NO: 412 - DNA, 20 bp, synthetic construct
  source 1..20: mol_type = other DNA
ccacgtggacatgaggggaa

SEQ ID NO: 413 - DNA, 20 bp, synthetic construct
  source 1..20: mol_type = other DNA
cctgcccagaacatctcccc

SEQ ID NO: 414 - DNA, 20 bp, synthetic construct
  source 1..20: mol_type = other DNA
ttttccatgggaaggtgggg

SEQ ID NO: 415 - DNA, 20 bp, synthetic construct
  source 1..20: mol_type = other DNA
tgggaaaaggaatctgggcc

SEQ ID NO: 416 - DNA, 20 bp, synthetic construct
  source 1..20: mol_type = other DNA
tgaccacctgccatgacctc

SEQ ID NO: 417 - DNA, 20 bp, synthetic construct
  source 1..20: mol_type = other DNA
gggactcacactggggtcta

SEQ ID NO: 418 - DNA, 20 bp, synthetic construct
  source 1..20: mol_type = other DNA
agcgtcctcatctgtagaga

SEQ ID NO: 419 - DNA, 20 bp, synthetic construct
  source 1..20: mol_type = other DNA
tcgaagcccaattccagtcc

SEQ ID NO: 420 - DNA, 20 bp, synthetic construct
  source 1..20: mol_type = other DNA
ccatgaatgatgaggctgct

SEQ ID NO: 421 - DNA, 20 bp, synthetic construct
  source 1..20: mol_type = other DNA
gctgaaaggggactgctgat

SEQ ID NO: 422 - DNA, 20 bp, synthetic construct
  source 1..20: mol_type = other DNA
aagcaaaagtccccaactcg

SEQ ID NO: 423 - DNA, 20 bp, synthetic construct
  source 1..20: mol_type = other DNA
ctgtggtcatggggtgtacc

SEQ ID NO: 424 - DNA, 20 bp, synthetic construct
  source 1..20: mol_type = other DNA
gcgtgttgctctatgagaga

SEQ ID NO: 425 - DNA, 20 bp, synthetic construct
  source 1..20: mol_type = other DNA
acagggtcactcggctgttg

SEQ ID NO: 426 - DNA, 20 bp, synthetic construct
  source 1..20: mol_type = other DNA
ggcacttcattgtcacccaa

SEQ ID NO: 427 - DNA, 20 bp, synthetic construct
  source 1..20: mol_type = other DNA
gctggacactgtgtggatca

SEQ ID NO: 428 - DNA, 20 bp, synthetic construct
  source 1..20: mol_type = other DNA
aacctttgtcctggagaccc

SEQ ID NO: 429 - DNA, 20 bp, synthetic construct
  source 1..20: mol_type = other DNA
aaggagccgaaagtcacacc

SEQ ID NO: 430 - DNA, 20 bp, synthetic construct
  source 1..20: mol_type = other DNA
gtctgtagaaaggggcctgg

SEQ ID NO: 431 - DNA, 20 bp, synthetic construct
  source 1..20: mol_type = other DNA
ccaagactagctgcacactt

SEQ ID NO: 432 - DNA, 20 bp, synthetic construct
  source 1..20: mol_type = other DNA
tgtgtggagaggaactgagt

SEQ ID NO: 433 - DNA, 20 bp, synthetic construct
  source 1..20: mol_type = other DNA
tgtcatgcccagtccatagg

SEQ ID NO: 434 - DNA, 20 bp, synthetic construct
  source 1..20: mol_type = other DNA
gaactcagtactgggcatgg

SEQ ID NO: 435 - DNA, 20 bp, synthetic construct
  source 1..20: mol_type = other DNA
ctgacctcctctccttggga

SEQ ID NO: 436 - DNA, 22 bp, synthetic construct
  source 1..22: mol_type = other DNA
tggccatctagattcaccacag

SEQ ID NO: 437 - DNA, 20 bp, synthetic construct
  source 1..20: mol_type = other DNA
cttagcaggatccctcacca

SEQ ID NO: 438 - DNA, 20 bp, synthetic construct
  source 1..20: mol_type = other DNA
tgctcaggcttcaatcacac

SEQ ID NO: 439 - DNA, 20 bp, synthetic construct
  source 1..20: mol_type = other DNA
tgccttcaccagctgtcagg

SEQ ID NO: 440 - DNA, 20 bp, synthetic construct
  source 1..20: mol_type = other DNA
aggctgaatgaagcactccc

SEQ ID NO: 441 - DNA, 20 bp, synthetic construct
  source 1..20: mol_type = other DNA
gggtaggaggggtacgtatt

SEQ ID NO: 442 - DNA, 20 bp, synthetic construct
  source 1..20: mol_type = other DNA
ggaacaggaggatgcatcag

SEQ ID NO: 443 - DNA, 19 bp, synthetic construct
  source 1..19: mol_type = other DNA
ttcagccactgtggaaagc

SEQ ID NO: 444 - DNA, 20 bp, synthetic construct
  source 1..20: mol_type = other DNA
cacctgtaaccacaccccca

SEQ ID NO: 445 - DNA, 20 bp, synthetic construct
  source 1..20: mol_type = other DNA
aaaatgtcatgctgcgctgg

SEQ ID NO: 446 - DNA, 20 bp, synthetic construct
  source 1..20: mol_type = other DNA
gatggagatccctgtgcctg

SEQ ID NO: 447 - DNA, 20 bp, synthetic construct
  source 1..20: mol_type = other DNA
tatgctccctgtggtaccga

SEQ ID NO: 448 - DNA, 20 bp, synthetic construct
  source 1..20: mol_type = other DNA
gctgaggcaacaaccaaagg

SEQ ID NO: 449 - DNA, 21 bp, synthetic construct
  source 1..21: mol_type = other DNA
caagtgtatgagctgcccctg

SEQ ID NO: 450 - DNA, 20 bp, synthetic construct
  source 1..20: mol_type = other DNA
cacactgaagagagctggca

SEQ ID NO: 451 - DNA, 20 bp, synthetic construct
  source 1..20: mol_type = other DNA
aacacagcccgatctgaagg

SEQ ID NO: 452 - DNA, 20 bp, synthetic construct
  source 1..20: mol_type = other DNA
tgccatccaaccacctgaaa

SEQ ID NO: 453 - DNA, 20 bp, synthetic construct
  source 1..20: mol_type = other DNA
attcgttcaggaacagccgt

SEQ ID NO: 454 - DNA, 20 bp, synthetic construct
  source 1..20: mol_type = other DNA
atggaatggtgaaggggagc

SEQ ID NO: 455 - DNA, 22 bp, synthetic construct
  source 1..22: mol_type = other DNA
tcagtgggtcaatgaagaagtt

SEQ ID NO: 456 - DNA, 20 bp, synthetic construct
  source 1..20: mol_type = other DNA
ggacaacttgagggccatga

SEQ ID NO: 457 - DNA, 20 bp, synthetic construct
  source 1..20: mol_type = other DNA
acactgggcttgccatgtaa

SEQ ID NO: 458 - DNA, 20 bp, synthetic construct
  source 1..20: mol_type = other DNA
gtgtctgtgtggagactggg

SEQ ID NO: 459 - DNA, 20 bp, synthetic construct
  source 1..20: mol_type = other DNA
gcagaggcagtacagaagca

SEQ ID NO: 460 - DNA, 20 bp, synthetic construct
  source 1..20: mol_type = other DNA
caaaaccacagcaggcctcg

SEQ ID NO: 461 - DNA, 20 bp, synthetic construct
  source 1..20: mol_type = other DNA
catgccaggagcttggaaga

SEQ ID NO: 462 - DNA, 20 bp, synthetic construct
  source 1..20: mol_type = other DNA
ggtcagtgcagtcagcttct

SEQ ID NO: 463 - DNA, 20 bp, synthetic construct
  source 1..20: mol_type = other DNA
ttcatgtcctcactgggccc

SEQ ID NO: 464 - DNA, 20 bp, synthetic construct
  source 1..20: mol_type = other DNA
attgggtgcagcatagtccc

SEQ ID NO: 465 - DNA, 20 bp, synthetic construct
  source 1..20: mol_type = other DNA
tgccttcaccagctgtcagg

SEQ ID NO: 466 - DNA, 20 bp, synthetic construct
  source 1..20: mol_type = other DNA
cgcccacctcaacttctcaa

SEQ ID NO: 467 - DNA, 20 bp, synthetic construct
  source 1..20: mol_type = other DNA
gcctctccacaacctccttc

SEQ ID NO: 468 - DNA, 20 bp, synthetic construct
  source 1..20: mol_type = other DNA
tctaccctcctccatcctgc

SEQ ID NO: 469 - DNA, 20 bp, synthetic construct
  source 1..20: mol_type = other DNA
gtagctcaggcgtatgtccc

SEQ ID NO: 470 - DNA, 20 bp, synthetic construct
  source 1..20: mol_type = other DNA
ggaagacaggtgggtaaggc

SEQ ID NO: 471 - DNA, 20 bp, synthetic construct
  source 1..20: mol_type = other DNA
cctcctctgtaggcctcgag

SEQ ID NO: 472 - DNA, 20 bp, synthetic construct
  source 1..20: mol_type = other DNA
gacattggctttgtcacggg

SEQ ID NO: 473 - DNA, 20 bp, synthetic construct
  source 1..20: mol_type = other DNA
gttgcgaggaaccagtgaga

SEQ ID NO: 474 - DNA, 20 bp, synthetic construct
  source 1..20: mol_type = other DNA
tcagtctaggctgtttgggg

SEQ ID NO: 475 - DNA, 20 bp, synthetic construct
  source 1..20: mol_type = other DNA
ttccctacatccccatgacc

SEQ ID NO: 476 - DNA, 20 bp, synthetic construct
  source 1..20: mol_type = other DNA
ccagcccagaagaaggacag

SEQ ID NO: 477 - DNA, 20 bp, synthetic construct
  source 1..20: mol_type = other DNA
gtactgggagctccacccta

SEQ ID NO: 478 - DNA, 22 bp, synthetic construct
  source 1..22: mol_type = other DNA
agaatcaagagaagggagagca

SEQ ID NO: 479 - DNA, 20 bp, synthetic construct
  source 1..20: mol_type = other DNA
ctaatggtgtggaggccagg

SEQ ID NO: 480 - DNA, 20 bp, synthetic construct
  source 1..20: mol_type = other DNA
cagatgataggagctgggcg

SEQ ID NO: 481 - DNA, 20 bp, synthetic construct
  source 1..20: mol_type = other DNA
tgtacactcgccaccctttc

SEQ ID NO: 482 - DNA, 21 bp, synthetic construct
  source 1..21: mol_type = other DNA
acttgaccataaggactgcca

SEQ ID NO: 483 - DNA, 20 bp, synthetic construct
  source 1..20: mol_type = other DNA
gtcctgccttctatacccgc

SEQ ID NO: 484 - DNA, 21 bp, synthetic construct
  source 1..21: mol_type = other DNA
caactgctagaccccacacca

SEQ ID NO: 485 - DNA, 20 bp, synthetic construct
  source 1..20: mol_type = other DNA
tgtgggaagactccttgggc

SEQ ID NO: 486 - DNA, 20 bp, synthetic construct
  source 1..20: mol_type = other DNA
ttctggaggagaggcgatga

SEQ ID NO: 487 - DNA, 20 bp, synthetic construct
  source 1..20: mol_type = other DNA
tctcacatttgccccctccc

SEQ ID NO: 488 - DNA, 20 bp, synthetic construct
  source 1..20: mol_type = other DNA
cagctggcagggaaggttaa

SEQ ID NO: 489 - DNA, 20 bp, synthetic construct
  source 1..20: mol_type = other DNA
tatgaggcggtgacaatggg

SEQ ID NO: 490 - DNA, 20 bp, synthetic construct
  source 1..20: mol_type = other DNA
actcttcccatctcctgcct

SEQ ID NO: 491 - DNA, 20 bp, synthetic construct
  source 1..20: mol_type = other DNA
tgagtgttcctccagtgtca

SEQ ID NO: 492 - DNA, 20 bp, synthetic construct
  source 1..20: mol_type = other DNA
tagaacctccaaacccgtgc

SEQ ID NO: 493 - DNA, 21 bp, synthetic construct
  source 1..21: mol_type = other DNA
agaagagcacattctgtctga

SEQ ID NO: 494 - DNA, 20 bp, synthetic construct
  source 1..20: mol_type = other DNA
tcctcatcagggtccctttg

SEQ ID NO: 495 - DNA, 20 bp, synthetic construct
  source 1..20: mol_type = other DNA
gactgggtggttatggagcc

SEQ ID NO: 496 - DNA, 20 bp, synthetic construct
  source 1..20: mol_type = other DNA
acctgaagttggtgtgcaca

SEQ ID NO: 497 - DNA, 20 bp, synthetic construct
  source 1..20: mol_type = other DNA
attcattgcagccctgtcca

SEQ ID NO: 498 - DNA, 20 bp, synthetic construct
  source 1..20: mol_type = other DNA
caaggcatgaagatggggat

SEQ ID NO: 499 - DNA, 20 bp, synthetic construct
  source 1..20: mol_type = other DNA
tctcagtgctgtgcctaagc

SEQ ID NO: 500 - DNA, 20 bp, synthetic construct
  source 1..20: mol_type = other DNA
aaaggaggcctcaaaagggg

SEQ ID NO: 501 - DNA, 20 bp, synthetic construct
  source 1..20: mol_type = other DNA
tttcaggcttctggcgattt

SEQ ID NO: 502 - DNA, 20 bp, synthetic construct
  source 1..20: mol_type = other DNA
ggggcacttcagtaccattt

SEQ ID NO: 503 - DNA, 20 bp, synthetic construct
  source 1..20: mol_type = other DNA
cacggggtctgtgatccatg

SEQ ID NO: 504 - DNA, 20 bp, synthetic construct
  source 1..20: mol_type = other DNA
aaattctgaaagggagcccc

SEQ ID NO: 505 - DNA, 20 bp, synthetic construct
  source 1..20: mol_type = other DNA
atataggggagctggggcaa

SEQ ID NO: 506 - DNA, 20 bp, synthetic construct
  source 1..20: mol_type = other DNA
ggtgggagaggtcttggtgg

SEQ ID NO: 507 - DNA, 20 bp, synthetic construct
  source 1..20: mol_type = other DNA
tcctgcattcacagccactt

SEQ ID NO: 508 - DNA, 20 bp, synthetic construct
  source 1..20: mol_type = other DNA
gccctcaaggtttgttcccg

SEQ ID NO: 509 - DNA, 20 bp, synthetic construct
  source 1..20: mol_type = other DNA
tcagagagaagagtggggca

SEQ ID NO: 510 - DNA, 20 bp, synthetic construct
  source 1..20: mol_type = other DNA
cccgtggttccagctcctta

SEQ ID NO: 511 - DNA, 20 bp, synthetic construct
  source 1..20: mol_type = other DNA
tgacctcatgatccgcccac

SEQ ID NO: 512 - DNA, 22 bp, synthetic construct
  source 1..22: mol_type = other DNA
ttccctcgggactttgaaagca

SEQ ID NO: 513 - DNA, 20 bp, synthetic construct
  source 1..20: mol_type = other DNA
cctgctctcccctactccat

SEQ ID NO: 514 - DNA, 20 bp, synthetic construct
  source 1..20: mol_type = other DNA
tcactctgccccaaacctgg

SEQ ID NO: 515 - DNA, 20 bp, synthetic construct
  source 1..20: mol_type = other DNA
gtctgcatgtgcgacgtttt

SEQ ID NO: 516 - DNA, 20 bp, synthetic construct
  source 1..20: mol_type = other DNA
agcctctccccttctctcag

SEQ ID NO: 517 - DNA, 20 bp, synthetic construct
  source 1..20: mol_type = other DNA
attcaatccacggcacctgt

SEQ ID NO: 518 - DNA, 20 bp, synthetic construct
  source 1..20: mol_type = other DNA
cccaagaaggaagccctcag

SEQ ID NO: 519 - DNA, 20 bp, synthetic construct
  source 1..20: mol_type = other DNA
agccatgagcatctcacgaa

SEQ ID NO: 520 - DNA, 20 bp, synthetic construct
  source 1..20: mol_type = other DNA
agcgacctttccacctgctt

SEQ ID NO: 521 - DNA, 20 bp, synthetic construct
  source 1..20: mol_type = other DNA
tggcactctcaaggaagcag

SEQ ID NO: 522 - DNA, 20 bp, synthetic construct
  source 1..20: mol_type = other DNA
acctcacagaagcgtcgttt

SEQ ID NO: 523 - DNA, 20 bp, synthetic construct
  source 1..20: mol_type = other DNA
cgtggacactgactccttcc

SEQ ID NO: 524 - DNA, 20 bp, synthetic construct
  source 1..20: mol_type = other DNA
atacagccagcgttgtggga

SEQ ID NO: 525 - DNA, 20 bp, synthetic construct
  source 1..20: mol_type = other DNA
tcctgggaagtgagagcaga

SEQ ID NO: 526 - DNA, 20 bp, synthetic construct
  source 1..20: mol_type = other DNA
ggatgctgacttctgacagt

SEQ ID NO: 527 - DNA, 20 bp, synthetic construct
  source 1..20: mol_type = other DNA
acctgaagttggtgtgcaca

SEQ ID NO: 528 - DNA, 20 bp, synthetic construct
  source 1..20: mol_type = other DNA
gaccttcccatcatgacacc

SEQ ID NO: 529 - DNA, 20 bp, synthetic construct
  source 1..20: mol_type = other DNA
attcattgcagccctgtcca

SEQ ID NO: 530 - DNA, 20 bp, synthetic construct
  source 1..20: mol_type = other DNA
ggagtttgagctgggtcaat

SEQ ID NO: 531 - DNA, 20 bp, synthetic construct
  source 1..20: mol_type = other DNA
tcaaagttggggcttggtgt

SEQ ID NO: 532 - DNA, 20 bp, synthetic construct
  source 1..20: mol_type = other DNA
caaggcatgaagatggggat

SEQ ID NO: 533 - DNA, 20 bp, synthetic construct
  source 1..20: mol_type = other DNA
gtgctgtgcccttgaacctc

SEQ ID NO: 534 - DNA, 21 bp, synthetic construct
  source 1..21: mol_type = other DNA
acacagagaacccttaagtgc

SEQ ID NO: 535 - DNA, 20 bp, synthetic construct
  source 1..20: mol_type = other DNA
cattccctccagaaccaccc

SEQ ID NO: 536 - DNA, 20 bp, synthetic construct
  source 1..20: mol_type = other DNA
actagctctgtgacgttggc

SEQ ID NO: 537 - DNA, 20 bp, synthetic construct
  source 1..20: mol_type = other DNA
tctcagtgctgtgcctaagc

SEQ ID NO: 538 - DNA, 20 bp, synthetic construct
  source 1..20: mol_type = other DNA
aaaggaggcctcaaaagggg

SEQ ID NO: 539 - DNA, 20 bp, synthetic construct
  source 1..20: mol_type = other DNA
tttcaggcttctggcgattt

SEQ ID NO: 540 - DNA, 20 bp, synthetic construct
  source 1..20: mol_type = other DNA
ggggcacttcagtaccattt

SEQ ID NO: 541 - DNA, 20 bp, synthetic construct
  source 1..20: mol_type = other DNA
cacggggtctgtgatccatg

SEQ ID NO: 542 - DNA, 20 bp, synthetic construct
  source 1..20: mol_type = other DNA
aaattctgaaagggagcccc

SEQ ID NO: 543 - DNA, 20 bp, synthetic construct
  source 1..20: mol_type = other DNA
ccatggtccaccctctcaac

SEQ ID NO: 544 - DNA, 20 bp, synthetic construct
  source 1..20: mol_type = other DNA
atataggggagctggggcaa

SEQ ID NO: 545 - protein, 1071 aa, Bacillus sp.
MRELDYRIGLDIGTNSIGWGVIELSWNKDRERYEKVRIVDQGVRMFDRAEMPKTGASLAEPRRIARSSRRRLNRKSQRKKNIRNLLVQHGVITQEELDSLYPLSKKSMDIWGIRLDGLDRLLNHFEWARLLIHLAQRRGFKSNRKSELKDTETGKVLSSIQLNEKRLSLYRTVGEMWMKDPDFSKYDRKRNSPNEYVFSVSRAELEKEIVTLFAAQRRFQSPYASKDLQETYLQIWTHQLPFASGNAILNKVGYCSLLKGKERRIPKATYTFQYFSALDQVNRTRLGPDFQPFTKEQREIILNNMFQRTDYYKKKTIPEVTYYDIRKWLELDETIQFKGLNYDPNEELKKIEKKPFINLKAFYEINKVVANYSERTNETFSTLDYDGIGYALTVYKTDKDIRSYLKSSHNLPKRCYDDQLIEELLSLSYTKFGHLSLKAINHVLSIMQKGNTYKEAVDQLGYDTSGLKKEKRSKFLPPISDEITNPIVKRALTQARKVVNAIIRRHGSPHSVHIELARELSKNHDERTKIVSAQDENYKKNKGAISILSEHGILNPTGYDIVRYKLWKEQGERCAYSLKEIPADTFFNELKKERNGAPILEVDHILPYSQSFIDSYHNKVLVYSDENRKKGNRIPYTYFLETNKDWEAFERYVRSNKFFSKKKREYLLKRAYLPRESELIKERHLNDTRYASTFLKNFIEQNLQFKEAEDNPRKRRVQTVNGVITAHFRKRWGLEKDRQETYLHHAMDAIIVACTDHHMVTRVTEYYQIKESNKSVKKPYFPMPWEGFRDELLSHLASQPIAKKISEELKAGYQSLDYIFVSRMPKRSITGAAHKQTIMRKGGIDKKGKTIIIERLHLKDIKFDENGDFKMVGKEQDMATYEAIKQRYLEHGKNSKKAFETPLYKPSKKGTGNLIKRVKVEGQAKSFVREVNGGVAQNGDLVRVDLFEKDDKYYMVPIYVPDTVCSELPKKVVASSKGYEQWLTLDNSFTFKFSLYPYDLVRLVKGDEDRFLYFGTLDIDSDRLNFKDVNKPSKKNEYRYSLKTIEDLEKYEVGVLGDLRLVRKETRRNFH

SEQ ID NO: 546 - RNA, 21 nt, Bacillus sp.
  source 1..21: mol_type = genomic RNA
gtcatagttccattaaagcca

SEQ ID NO: 547 - RNA, 85 nt, Bacillus sp.
  source 1..85: mol_type = genomic RNA
tggctttgatgtttctatgataagggtttcgacccgtggcgtcggggatcgcctgcccattgaaatgggcttctccccatttatt

SEQ ID NO: 548 - DNA, 3213 bp, synthetic construct
  source 1..3213: mol_type = other DNA
atgagagagctggactacagaattggcctggacatcggcaccaacagcatcggatggggcgtgatcgagctgtcctggaacaaagaccgggagagatacgagaaggtcagaatcgtggatcaaggcgtgagaatgttcgacagagccgagatgcccaagacaggcgccagcttagctgaacccagaagaatcgccagatccagcagacggagactgaatcgcaagtcccagagaaagaaaaacatccggaacctgctggtgcaacacggcgtgatcacacaggaggaactggatagcctgtaccccctgagcaaaaagagcatggacatctggggcattcggctcgacggcctggacagactcctcaatcatttcgagtgggccagactgctgatccacctggctcagagacggggctttaagtccaacagaaagagtgaactgaaagatacagagacaggcaaggtgctgagcagcatccaactgaacgagaaacggctgagcttgtatagaaccgtgggcgagatgtggatgaaggaccccgacttctctaaatacgataggaagagaaatagccccaacgaatacgtgttcagcgtgtctagagccgagctggaaaaggaaatcgtgaccctgttcgccgcccagcggagattccagagcccttacgccagcaaagatctgcaggagacatatctgcagatctggacccaccaactgcctttcgccagcggcaatgccatcctgaacaaggtcggatactgctccctgttgaaaggcaaagaaagaaggattcccaaggctacatacaccttccaatacttctctgctctggaccaggtgaatcggaccagactgggacctgatttccagcccttcaccaaggagcaacgggaaattatcttgaacaacatgttccagaggacagattactacaagaagaaaaccatccccgaggtgacctactatgacatacggaagtggctggaattggacgagacaattcagttcaagggcctgaactacgaccctaacgaggaactgaagaagatcgagaagaagccttttatcaatctgaaggccttctacgagatcaacaaggtggtggccaactacagcgaaagaaccaacgagaccttctccaccctggactacgacggcatcggctacgccctgaccgtgtacaaaaccgacaaggatatccgcagctacctgaagagcagtcacaacctacctaagagatgctacgacgaccaactgatcgaggaactgctgagcctgagctacacaaagttcggccacctgtccctgaaagccatcaaccacgtgctgtctatcatgcagaagggcaatacctacaaggaagccgtggaccaactgggctacgacaccagcggccttaagaaggagaagaggtccaagttcctgccacctatttctgatgaaatcacgaatccaatcgtgaaaagggccctgacccaggccagaaaagtggtgaacgccataattagaagacacggatctcctcactccgtgcacatcgagctggccagagagctgagcaagaaccacgacgagcggacaaagatcgtcagcgcccaggatgaaaactacaagaaaaacaagggcgctatcagcatcctgtctgagcacggcatcctgaaccctacaggctacgacatcgtgagatacaaactgtggaaggagcagggcgaacggtgcgcctacagcctgaaggaaatccctgccgatacatttttcaacgagctgaagaaggaacgcaacggcgcccctatccttgaagtggaccacatcctgccctacagccagtccttcatcgactcctaccacaacaaggtcctggtgtacagcgacgaaaaccggaaaaagggcaacagaatcccttatacctacttcctggaaaccaacaaggattgggaggcctttgagcggtacgtgcggagcaacaaattcttctccaagaaaaagcgagagtaccttctgaagcgggcttatctgcctagagaatctgagctgatcaaagaacgccacctgaacgacaccagatacgcctctaccttcctgaagaacttcatcgagcagaacctgcagttcaaggaagccgaggacaaccccagaaaaagacgggtgcaaaccgtgaacggcgttatcaccgcccacttcagaaagcggtggggcctggagaaggaccggcaggagacatacctccatcacgctatggacgccatcatcgtggcttgtacagaccaccacatggtcaccagagtgaccgagtactatcagatcaaggaaagcaacaagagcgtgaagaagccctattttcctatgccttgggaaggcttccgggacgagctgctgagccacttggcttctcagcctatcgccaagaaaatcagcgaggaactgaaggccggctaccagagcctggactacatcttcgtgtccagaatgcctaagagaagcattacaggcgctgctcataagcagaccatcatgcggaagggaggaattgacaagaagggcaaaacaatcatcatcgaacggctgcacctgaaggatatcaagttcgacgagaacggagatttcaagatggtgggcaaggaacaggacatggccacatacgaagctattaaacagagatacctggagcacggcaagaatagcaagaaggccttcgagacccctctgtacaagcccagcaaaaagggcacaggtaacctgatcaagcgggtgaaggtggaaggacaggccaagagctttgtgagggaagtgaacggcggagtggcccaaaatggcgatctggttagagttgatttgtttgagaaggatgataagtactacatggtccccatctacgtgccagacaccgtgtgtagcgagctgcccaaaaaggtggtcgccagctctaagggctatgagcagtggctgacactggataacagcttcacctttaagttcagcctgtacccttatgatctggtgcggctggtcaagggagatgaggatcggttcctgtactttggcaccctggacatcgacagcgacagacttaacttcaaggacgtgaacaagccaagcaagaagaacgagtaccggtacagcttgaaaaccatcgaggacttggagaagtacgaggtgggcgtgctgggcgatctaagactggtccggaaggaaactcgaagaaacttccac

SEQ ID NO: 549 - RNA, 16 nt, synthetic construct
  source 1..16: mol_type = other RNA
gtcatagttccattaa

SEQ ID NO: 550 - RNA, 15 nt, synthetic construct
  source 1..15: mol_type = other RNA
gtcatagttccatta

SEQ ID NO: 551 - RNA, 14 nt, synthetic construct
  source 1..14: mol_type = other RNA
gtcatagttccatt

SEQ ID NO: 552 - RNA, 13 nt, synthetic construct
  source 1..13: mol_type = other RNA
gtcatagttccat

SEQ ID NO: 553 - RNA, 74 nt, synthetic construct
  source 1..74: mol_type = other RNA
ttgatgtttctatgataagggtttcgacccgtggcgtcggggatcgcctgcccttgaaagggcttctccccatt

SEQ ID NO: 554 - RNA, 79 nt, synthetic construct
  source 1..79: mol_type = other RNA
tgatgtttctatgataagggtttcgacccgtggcgtcggggatcgcctgcccattgaaatgggcttctccccatttatt

SEQ ID NO: 555 - RNA, 73 nt, synthetic construct
  source 1..73: mol_type = other RNA
tgatgtttctatgataagggtttcgacccgtggcgtcggggatcgcctgcccattgaaatgggcttctcccca

SEQ ID NO: 556 - RNA, 71 nt, synthetic construct
  source 1..71: mol_type = other RNA
tgatgtttctatgataagggtttcgacccgtggcgtcggggatcgcctgcccttgaaagggcttctcccca

SEQ ID NO: 557 - RNA, 78 nt, synthetic construct
  source 1..78: mol_type = other RNA
gatgtttctatgataagggtttcgacccgtggcgtcggggatcgcctgcccattgaaatgggcttctccccatttatt

SEQ ID NO: 558 - RNA, 72 nt, synthetic construct
  source 1..72: mol_type = other RNA
gatgtttctatgataagggtttcgacccgtggcgtcggggatcgcctgcccattgaaatgggcttctcccca

SEQ ID NO: 559 - RNA, 70 nt, synthetic construct
  source 1..70: mol_type = other RNA
gatgtttctatgataagggtttcgacccgtggcgtcggggatcgcctgcccttgaaagggcttctcccca

SEQ ID NO: 560 - RNA, 77 nt, synthetic construct
  source 1..77: mol_type = other RNA
atgtttctatgataagggtttcgacccgtggcgtcggggatcgcctgcccattgaaatgggcttctccccatttatt

SEQ ID NO: 561 - RNA, 71 nt, synthetic construct
  source 1..71: mol_type = other RNA
atgtttctatgataagggtttcgacccgtggcgtcggggatcgcctgcccattgaaatgggcttctcccca

SEQ ID NO: 562 - RNA, 69 nt, synthetic construct
  source 1..69: mol_type = other RNA
atgtttctatgataagggtttcgacccgtggcgtcggggatcgcctgcccttgaaagggcttctcccca

SEQ ID NO: 563 - RNA, 94 nt, synthetic construct
  source 1..94: mol_type = other RNA
gtcatagttccattaaaaagttgatgtttctatgataagggtttcgacccgtggcgtcggggatcgcctgcccttgaaagggcttctccccatt

SEQ ID NO: 564 - RNA, 98 nt, synthetic construct
  source 1..98: mol_type = other RNA
gtcatagttccattaaaagtgatgtttctatgataagggtttcgacccgtggcgtcggggatcgcctgcccattgaaatgggcttctccccatttatt

SEQ ID NO: 565 - RNA, 92 nt, synthetic construct
  source 1..92: mol_type = other RNA
gtcatagttccattaaaagtgatgtttctatgataagggtttcgacccgtggcgtcggggatcgcctgcccattgaaatgggcttctcccca

SEQ ID NO: 566 - RNA, 90 nt, synthetic construct
  source 1..90: mol_type = other RNA
gtcatagttccattaaaagtgatgtttctatgataagggtttcgacccgtggcgtcggggatcgcctgcccttgaaagggcttctcccca

SEQ ID NO: 567 - RNA, 96 nt, synthetic construct
  source 1..96: mol_type = other RNA
gtcatagttccattaaaggatgtttctatgataagggtttcgacccgtggcgtcggggatcgcctgcccattgaaatgggcttctccccatttatt

SEQ ID NO: 568 - RNA, 90 nt, synthetic construct
  source 1..90: mol_type = other RNA
gtcatagttccattaaaggatgtttctatgataagggtttcgacccgtggcgtcggggatcgcctgcccattgaaatgggcttctcccca

SEQ ID NO: 569 - RNA, 88 nt, synthetic construct
  source 1..88: mol_type = other RNA
gtcatagttccattaaaggatgtttctatgataagggtttcgacccgtggcgtcggggatcgcctgcccttgaaagggcttctcccca

SEQ ID NO: 570 - RNA, 94 nt, synthetic construct
  source 1..94: mol_type = other RNA
gtcatagttccataaagatgtttctatgataagggtttcgacccgtggcgtcggggatcgcctgcccattgaaatgggcttctccccatttatt

SEQ ID NO: 571 - RNA, 88 nt, synthetic construct
  source 1..88: mol_type = other RNA
gtcatagttccataaagatgtttctatgataagggtttcgacccgtggcgtcggggatcgcctgcccattgaaatgggcttctcccca

SEQ ID NO: 572 - RNA, 86 nt, synthetic construct
  source 1..86: mol_type = other RNA
gtcatagttccataaagatgtttctatgataagggtttcgacccgtggcgtcggggatcgcctgcccttgaaagggcttctcccca

SEQ ID NO: 573 - RNA, 110 nt, synthetic construct
  source 1..110: mol_type = other RNA
gtcatagttccattaaagccaaaagtggctttgatgtttctatgataagggtttcgacccgtggcgtcggggatcgcctgcccattgaaatgggcttctccccatttatt

SEQ ID NO: 574 - RNA, 39 nt, synthetic construct
  source 1..39: mol_type = other RNA
tgccaggcctggggttgggcatcgtcatagttccattaa

SEQ ID NO: 575 - RNA, 39 nt, synthetic construct
  source 1..39: mol_type = other RNA
caggtctgaggctttgggtgcaggtcatagttccattaa

SEQ ID NO: 576 - RNA, 39 nt, synthetic construct
  source 1..39: mol_type = other RNA
tcgaagatctcggccctggaagggtcatagttccattaa

SEQ ID NO: 577 - RNA, 38 nt, synthetic construct
  source 1..38: mol_type = other RNA
tctcggccctggaaggttccccctggtcatagttccat

SEQ ID NO: 578 - RNA, 39 nt, synthetic construct
  source 1..39: mol_type = other RNA
ggttcaaggaagaagaggaggcagtcatagttccattaa

SEQ ID NO: 579 - RNA, 38 nt, synthetic construct
  source 1..38: mol_type = other RNA
ggggttcaaggaagaagaggaggcagtcatagttccat

SEQ ID NO: 580 - RNA, 41 nt, synthetic construct
  source 1..41: mol_type = other RNA
ttggacaaggacccgatgccgtcatagttccattaaagcca

SEQ ID NO: 581 - RNA, 41 nt, synthetic construct
  source 1..41: mol_type = other RNA
tggacaaggacccgatgcccgtcatagttccattaaagcca

SEQ ID NO: 582 - RNA, 41 nt, synthetic construct
  source 1..41: mol_type = other RNA
tggggttgggcatcgggtccgtcatagttccattaaagcca

SEQ ID NO: 583 - RNA, 41 nt, synthetic construct
  source 1..41: mol_type = other RNA
aaggacccgatgcccaacccgtcatagttccattaaagcca

SEQ ID NO: 584 - RNA, 41 nt, synthetic construct
  source 1..41: mol_type = other RNA
caggcctggggttgggcatcgtcatagttccattaaagcca

SEQ ID NO: 585 - RNA, 41 nt, synthetic construct
  source 1..41: mol_type = other RNA
atgcccaaccccaggcctgggtcatagttccattaaagcca

SEQ ID NO: 586 - RNA, 41 nt, synthetic construct
  source 1..41: mol_type = other RNA
tgcccttggacaaggacccggtcatagttccattaaagcca

SEQ ID NO: 587 - RNA, 41 nt, synthetic construct
  source 1..41: mol_type = other RNA
cttggacaaggacccgatgcgtcatagttccattaaagcca

SEQ ID NO: 588 - RNA, 41 nt, synthetic construct
  source 1..41: mol_type = other RNA
tcctcttcttccttgaacccgtcatagttccattaaagcca

SEQ ID NO: 589 - RNA, 41 nt, synthetic construct
  source 1..41: mol_type = other RNA
tcttcttccttgaaccccatgtcatagttccattaaagcca

SEQ ID NO: 590 - RNA, 41 nt, synthetic construct
  source 1..41: mol_type = other RNA
cgcagcctgcccttggacaagtcatagttccattaaagcca

SEQ ID NO: 591 - RNA, 41 nt, synthetic construct
  source 1..41: mol_type = other RNA
ggaaggggccgagggcttgcgtcatagttccattaaagcca

SEQ ID NO: 592 - RNA, 41 nt, synthetic construct
  source 1..41: mol_type = other RNA
ggcctggcaagccctcggccgtcatagttccattaaagcca

SEQ ID NO: 593 - RNA, 41 nt, synthetic construct
  source 1..41: mol_type = other RNA
gcaagccctcggccccttccgtcatagttccattaaagcca

SEQ ID NO: 594 - RNA, 41 nt, synthetic construct
  source 1..41: mol_type = other RNA
atgggccaagggccaaggaagtcatagttccattaaagcca

SEQ ID NO: 595 - RNA, 41 nt, synthetic construct
  source 1..41: mol_type = other RNA
cttggcccatccccaggagcgtcatagttccattaaagcca

SEQ ID NO: 596 - RNA, 41 nt, synthetic construct
  source 1..41: mol_type = other RNA
cctcgcccagctggagggctgtcatagttccattaaagcca

SEQ ID NO: 597 - RNA, 41 nt, synthetic construct
  source 1..41: mol_type = other RNA
gtctgaggctttgggtgcaggtcatagttccattaaagcca

SEQ ID NO: 598 - RNA, 41 nt, synthetic construct
  source 1..41: mol_type = other RNA
caggtctgaggctttgggtggtcatagttccattaaagcca

SEQ ID NO: 599 - RNA, 41 nt, synthetic construct
  source 1..41: mol_type = other RNA
aaggttccccctgggccccggtcatagttccattaaagcca

SEQ ID NO: 600 - RNA, 41 nt, synthetic construct
  source 1..41: mol_type = other RNA
gaaggttccccctgggccccgtcatagttccattaaagcca

SEQ ID NO: 601 - RNA, 41 nt, synthetic construct
  source 1..41: mol_type = other RNA
gccctggaaggttccccctggtcatagttccattaaagcca

SEQ ID NO: 602 - RNA, 41 nt, synthetic construct
  source 1..41: mol_type = other RNA
gggcccagggggaaccttccgtcatagttccattaaagcca

SEQ ID NO: 603 - RNA, 41 nt, synthetic construct
  source 1..41: mol_type = other RNA
agatctcggccctggaaggtgtcatagttccattaaagcca

SEQ ID NO: 604 - RNA, 41 nt, synthetic construct
  source 1..41: mol_type = other RNA
aagatctcggccctggaagggtcatagttccattaaagcca

SEQ ID NO: 605 - RNA, 41 nt, synthetic construct
  source 1..41: mol_type = other RNA
gaagatctcggccctggaaggtcatagttccattaaagcca

SEQ ID NO: 606 - RNA, 41 nt, synthetic construct
  source 1..41: mol_type = other RNA
cgaagatctcggccctggaagtcatagttccattaaagcca

SEQ ID NO: 607 - RNA, 41 nt, synthetic construct
  source 1..41: mol_type = other RNA
agggccgagatcttcgaggcgtcatagttccattaaagcca

SEQ ID NO: 608 - RNA, 41 nt, synthetic construct
  source 1..41: mol_type = other RNA
gggccccgcctcgaagatctgtcatagttccattaaagcca

SEQ ID NO: 609 - RNA, 41 nt, synthetic construct
  source 1..41: mol_type = other RNA
gggccgagatcttcgaggcggtcatagttccattaaagcca

SEQ ID NO: 610 - RNA, 41 nt, synthetic construct
  source 1..41: mol_type = other RNA
tgggccccgcctcgaagatcgtcatagttccattaaagcca

SEQ ID NO: 611 - RNA, 41 nt, synthetic construct
  source 1..41: mol_type = other RNA
gagatcttcgaggcggggccgtcatagttccattaaagcca

SEQ ID NO: 612 - RNA, 41 nt, synthetic construct
  source 1..41: mol_type = other RNA
atcttcgaggcggggcccatgtcatagttccattaaagcca

SEQ ID NO: 613 - RNA, 41 nt, synthetic construct
  source 1..41: mol_type = other RNA
gcggggcccatgcctcctctgtcatagttccattaaagcca

SEQ ID NO: 614 - RNA, 46 nt, synthetic construct
  source 1..46: mol_type = other RNA
cttgccaggcctggggttgggcatcgtcatagttccattaaagcca

SEQ ID NO: 615 - RNA, 46 nt, synthetic construct
  source 1..46: mol_type = other RNA
acccgatgcccaaccccaggcctgggtcatagttccattaaagcca

SEQ ID NO: 616 - RNA, 46 nt, synthetic construct
  source 1..46: mol_type = other RNA
gccaaggaaggggccgagggcttgcgtcatagttccattaaagcca

SEQ ID NO: 617 - RNA, 46 nt, synthetic construct
  source 1..46: mol_type = other RNA
agcaggtctgaggctttgggtgcaggtcatagttccattaaagcca

SEQ ID NO: 618 - RNA, 46 nt, synthetic construct
  source 1..46: mol_type = other RNA
tctcggccctggaaggttccccctggtcatagttccattaaagcca

SEQ ID NO: 619 - RNA, 46 nt, synthetic construct
  source 1..46: mol_type = other RNA
ctcgaagatctcggccctggaaggtgtcatagttccattaaagcca

SEQ ID NO: 620 - RNA, 46 nt, synthetic construct
  source 1..46: mol_type = other RNA
cctcgaagatctcggccctggaagggtcatagttccattaaagcca

SEQ ID NO: 621 - RNA, 37 nt, synthetic construct
  source 1..37: mol_type = other RNA
ttgccaggcctggggttgggcatcgtcatagttccat

SEQ ID NO: 622 - RNA, 37 nt, synthetic construct
  source 1..37: mol_type = other RNA
gcaggtctgaggctttgggtgcaggtcatagttccat

SEQ ID NO: 623 - RNA, 37 nt, synthetic construct
  source 1..37: mol_type = other RNA
ctcgaagatctcggccctggaagggtcatagttccat

SEQ ID NO: 624 - RNA, 46 nt, synthetic construct
  source 1..46: mol_type = other RNA
agccctcggccccttccttggccctgtcatagttccattaaagcca

SEQ ID NO: 625 - RNA, 46 nt, synthetic construct
  source 1..46: mol_type = other RNA
agctggagggctgcacccaaagcctgtcatagttccattaaagcca

SEQ ID NO: 626 - RNA, 46 nt, synthetic construct
  source 1..46: mol_type = other RNA
aggcatgggccccgcctcgaagatcgtcatagttccattaaagcca

SEQ ID NO: 627 - RNA, 46 nt, synthetic construct
  source 1..46: mol_type = other RNA
caagggccaaggaaggggccgaggggtcatagttccattaaagcca

SEQ ID NO: 628 - RNA, 46 nt, synthetic construct
  source 1..46: mol_type = other RNA
ccaaccccaggcctggcaagccctcgtcatagttccattaaagcca

SEQ ID NO: 629 - RNA, 46 nt, synthetic construct
  source 1..46: mol_type = other RNA
ccccagcaggtctgaggctttgggtgtcatagttccattaaagcca

SEQ ID NO: 630 - RNA, 46 nt, synthetic construct
  source 1..46: mol_type = other RNA
cccgatgcccaaccccaggcctggcgtcatagttccattaaagcca

SEQ ID NO: 631 - RNA, 46 nt, synthetic construct
  source 1..46: mol_type = other RNA
ccgagatcttcgaggcggggcccatgtcatagttccattaaagcca

SEQ ID NO: 632 - RNA, 46 nt, synthetic construct
  source 1..46: mol_type = other RNA
cctcctcttcttccttgaaccccatgtcatagttccattaaagcca

SEQ ID NO: 633 - RNA, 46 nt, synthetic construct
  source 1..46: mol_type = other RNA
cctggcaagccctcggccccttcctgtcatagttccattaaagcca

SEQ ID NO: 634 - RNA, 46 nt, synthetic construct
  source 1..46: mol_type = other RNA
cggccccttccttggcccttggcccgtcatagttccattaaagcca

SEQ ID NO: 635 - RNA, 46 nt, synthetic construct
  source 1..46: mol_type = other RNA
ctcgcccagctggagggctgcacccgtcatagttccattaaagcca

SEQ ID NO: 636 - RNA, 46 nt, synthetic construct
  source 1..46: mol_type = other RNA
ctcggccccttccttggcccttggcgtcatagttccattaaagcca

SEQ ID NO: 637 - RNA, 46 nt, synthetic construct
  source 1..46: mol_type = other RNA
ctgggggcccggggcccagggggaagtcatagttccattaaagcca

SEQ ID NO: 638 - RNA, 46 nt, synthetic construct
  source 1..46: mol_type = other RNA
gatctcggccctggaaggttcccccgtcatagttccattaaagcca

SEQ ID NO: 639 - RNA, 46 nt, synthetic construct
  source 1..46: mol_type = other RNA
gcacccaaagcctcagacctgctgggtcatagttccattaaagcca

SEQ ID NO: 640 - RNA, 46 nt, synthetic construct
  source 1..46: mol_type = other RNA
gcccaaccccaggcctggcaagcccgtcatagttccattaaagcca

SEQ ID NO: 641 - RNA, 46 nt, synthetic construct
  source 1..46: mol_type = other RNA
gccctggaaggttccccctgggcccgtcatagttccattaaagcca

SEQ ID NO: 642 - RNA, 46 nt, synthetic construct
  source 1..46: mol_type = other RNA
ggcccatgcctcctcttcttccttggtcatagttccattaaagcca

SEQ ID NO: 643 - RNA, 46 nt, synthetic construct
  source 1..46: mol_type = other RNA
ggcccttggcccatccccaggagccgtcatagttccattaaagcca

SEQ ID NO: 644 - RNA, 46 nt, synthetic construct
  source 1..46: mol_type = other RNA
gggccgagatcttcgaggcggggccgtcatagttccattaaagcca

SEQ ID NO: 645 - RNA, 46 nt, synthetic construct
  source 1..46: mol_type = other RNA
gggcgaggctcctggggatgggccagtcatagttccattaaagcca

SEQ ID NO: 646 - RNA, 46 nt, synthetic construct
  source 1..46: mol_type = other RNA
ggggcccatgcctcctcttcttcctgtcatagttccattaaagcca

SEQ ID NO: 647 - RNA, 46 nt, synthetic construct
  source 1..46: mol_type = other RNA
ggggttcaaggaagaagaggaggcagtcatagttccattaaagcca

SEQ ID NO: 648 - RNA, 46 nt, synthetic construct
  source 1..46: mol_type = other RNA
ggttcaaggaagaagaggaggcatggtcatagttccattaaagcca

SEQ ID NO: 649 - RNA, 46 nt, synthetic construct
  source 1..46: mol_type = other RNA
tcaaggaagaagaggaggcatgggcgtcatagttccattaaagcca

SEQ ID NO: 650 - RNA, 46 nt, synthetic construct
  source 1..46: mol_type = other RNA
tccagctgggcgaggctcctggggagtcatagttccattaaagcca

SEQ ID NO: 651 - RNA, 46 nt, synthetic construct
  source 1..46: mol_type = other RNA
tcgaggcggggcccatgcctcctctgtcatagttccattaaagcca

SEQ ID NO: 652 - RNA, 46 nt, synthetic construct
  source 1..46: mol_type = other RNA
tgggtgcagccctccagctgggcgagtcatagttccattaaagcca

SEQ ID NO: 653 - RNA, 46 nt, synthetic construct
  source 1..46: mol_type = other RNA
ttccagggccgagatcttcgaggcggtcatagttccattaaagcca

SEQ ID NO: 654 - RNA, 46 nt, synthetic construct
  source 1..46: mol_type = other RNA
aagcctcagacctgctgggggcccggtcatagttccattaaagcca

SEQ ID NO: 655 - RNA, 41 nt, synthetic construct
  source 1..41: mol_type = other RNA
cttgccaggcctggggttgggcatcgtcatagttccattaa

SEQ ID NO: 656 - RNA, 40 nt, synthetic construct
  source 1..40: mol_type = other RNA
ttgccaggcctggggttgggcatcgtcatagttccattaa

SEQ ID NO: 657 - RNA, 38 nt, synthetic construct
  source 1..38: mol_type = other RNA
gccaggcctggggttgggcatcgtcatagttccattaa

SEQ ID NO: 658 - RNA, 41 nt, synthetic construct
  source 1..41: mol_type = other RNA
agcaggtctgaggctttgggtgcaggtcatagttccattaa

SEQ ID NO: 659 - RNA, 40 nt, synthetic construct
  source 1..40: mol_type = other RNA
gcaggtctgaggctttgggtgcaggtcatagttccattaa

SEQ ID NO: 660 - RNA, 38 nt, synthetic construct
  source 1..38: mol_type = other RNA
aggtctgaggctttgggtgcaggtcatagttccattaa

SEQ ID NO: 661 - RNA, 41 nt, synthetic construct
  source 1..41: mol_type = other RNA
tctcggccctggaaggttccccctggtcatagttccattaa

SEQ ID NO: 662 - RNA, 40 nt, synthetic construct
  source 1..40: mol_type = other RNA
ctcggccctggaaggttccccctggtcatagttccattaa

SEQ ID NO: 663 - RNA, 39 nt, synthetic construct
  source 1..39: mol_type = other RNA
tcggccctggaaggttccccctggtcatagttccattaa

SEQ ID NO: 664 - RNA, 38 nt, synthetic construct
  source 1..38: mol_type = other RNA
cggccctggaaggttccccctggtcatagttccattaa

SEQ ID NO: 665 - RNA, 41 nt, synthetic construct
  source 1..41: mol_type = other RNA
cctcgaagatctcggccctggaagggtcatagttccattaa

SEQ ID NO: 666 - RNA, 40 nt, synthetic construct
  source 1..40: mol_type = other RNA
ctcgaagatctcggccctggaagggtcatagttccattaa

SEQ ID NO: 667 - RNA, 38 nt, synthetic construct
  source 1..38: mol_type = other RNA
cgaagatctcggccctggaagggtcatagttccattaa

SEQ ID NO: 668 - RNA, 37 nt, synthetic construct
  source 1..37: mol_type = other RNA
ctcggccctggaaggttccccctggtcatagttccat

SEQ ID NO: 669 - RNA, 40 nt, synthetic construct
  source 1..40: mol_type = other RNA
cttgccaggcctggggttgggcatcgtcatagttccatta

SEQ ID NO: 670 - RNA, 39 nt, synthetic construct
  source 1..39: mol_type = other RNA
cttgccaggcctggggttgggcatcgtcatagttccatt

SEQ ID NO: 671 - RNA, 38 nt, synthetic construct
  source 1..38: mol_type = other RNA
cttgccaggcctggggttgggcatcgtcatagttccat

SEQ ID NO: 672 - RNA, 40 nt, synthetic construct
  source 1..40: mol_type = other RNA
agcaggtctgaggctttgggtgcaggtcatagttccatta

SEQ ID NO: 673 - RNA, 39 nt, synthetic construct
  source 1..39: mol_type = other RNA
agcaggtctgaggctttgggtgcaggtcatagttccatt

SEQ ID NO: 674 - RNA, 38 nt, synthetic construct
  source 1..38: mol_type = other RNA
agcaggtctgaggctttgggtgcaggtcatagttccat

SEQ ID NO: 675 - RNA, 40 nt, synthetic construct
  source 1..40: mol_type = other RNA
tctcggccctggaaggttccccctggtcatagttccatta

SEQ ID NO: 676 - RNA, 39 nt, synthetic construct
  source 1..39: mol_type = other RNA
tctcggccctggaaggttccccctggtcatagttccatt

SEQ ID NO: 677 - RNA, 38 nt, synthetic construct; identical to SEQ ID NO: 577
  source 1..38: mol_type = other RNA

SEQ ID NO: 678 - RNA, 40 nt, synthetic construct
  source 1..40: mol_type = other RNA
cctcgaagatctcggccctggaagggtcatagttccatta

SEQ ID NO: 679 - RNA, 39 nt, synthetic construct
  source 1..39: mol_type = other RNA
cctcgaagatctcggccctggaagggtcatagttccatt

SEQ ID NO: 680 - RNA, 38 nt, synthetic construct
  source 1..38: mol_type = other RNA
cctcgaagatctcggccctggaagggtcatagttccat

SEQ ID NO: 681 - RNA, 41 nt, synthetic construct
  source 1..41: mol_type = other RNA
ggggttcaaggaagaagaggaggcagtcatagttccattaa

SEQ ID NO: 682 - RNA, 40 nt, synthetic construct
  source 1..40: mol_type = other RNA
gggttcaaggaagaagaggaggcagtcatagttccattaa

SEQ ID NO: 683 - RNA, 37 nt, synthetic construct
  source 1..37: mol_type = other RNA
gggttcaaggaagaagaggaggcagtcatagttccat

SEQ ID NO: 684 - RNA, 36 nt, synthetic construct
  source 1..36: mol_type = other RNA
ggttcaaggaagaagaggaggcagtcatagttccat

SEQ ID NO: 685 - RNA, 37 nt, synthetic construct; identical to SEQ ID NO: 621
  source 1..37: mol_type = other RNA

SEQ ID NO: 686 - RNA, 36 nt, synthetic construct
  source 1..36: mol_type = other RNA
tgccaggcctggggttgggcatcgtcatagttccat

SEQ ID NO: 687 - RNA, 37 nt, synthetic construct; identical to SEQ ID NO: 622
  source 1..37: mol_type = other RNA

SEQ ID NO: 688 - RNA, 36 nt, synthetic construct
  source 1..36: mol_type = other RNA
caggtctgaggctttgggtgcaggtcatagttccat

SEQ ID NO: 689 - RNA, 37 nt, synthetic construct; identical to SEQ ID NO: 668
  source 1..37: mol_type = other RNA

SEQ ID NO: 690 - RNA, 36 nt, synthetic construct
  source 1..36: mol_type = other RNA
tcggccctggaaggttccccctggtcatagttccat

SEQ ID NO: 691 - RNA, 37 nt, synthetic construct; identical to SEQ ID NO: 623
  source 1..37: mol_type = other RNA

SEQ ID NO: 692 - RNA, 36 nt, synthetic construct
  source 1..36: mol_type = other RNA
tcgaagatctcggccctggaagggtcatagttccat

SEQ ID NO: 693 - RNA, 117 nt, synthetic construct
  source 1..117: mol_type = other RNA
tgccaggcctggggttgggcatcgtcatagttccattaaaaagttgatgtttctatgataagggtttcgacccgtggcgtcggggatcgcctgcccttgaaagggcttctccccatt

SEQ ID NO: 694 - RNA, 117 nt, synthetic construct
  source 1..117: mol_type = other RNA
caggtctgaggctttgggtgcaggtcatagttccattaaaaagttgatgtttctatgataagggtttcgacccgtggcgtcggggatcgcctgcccttgaaagggcttctccccatt

SEQ ID NO: 695 - RNA, 117 nt, synthetic construct
  source 1..117: mol_type = other RNA
tcgaagatctcggccctggaagggtcatagttccattaaaaagttgatgtttctatgataagggtttcgacccgtggcgtcggggatcgcctgcccttgaaagggcttctccccatt

SEQ ID NO: 696 - RNA, 119 nt, synthetic construct
  source 1..119: mol_type = other RNA
tctcggccctggaaggttccccctggtcatagttccataaagatgtttctatgataagggtttcgacccgtggcgtcggggatcgcctgcccattgaaatgggcttctccccatttatt

SEQ ID NO: 697 - RNA, 117 nt, synthetic construct
  source 1..117: mol_type = other RNA
ggttcaaggaagaagaggaggcagtcatagttccattaaaaagttgatgtttctatgataagggtttcgacccgtggcgtcggggatcgcctgcccttgaaagggcttctccccatt

SEQ ID NO: 698 - RNA, 119 nt, synthetic construct
  source 1..119: mol_type = other RNA
ggggttcaaggaagaagaggaggcagtcatagttccataaagatgtttctatgataagggtttcgacccgtggcgtcggggatcgcctgcccattgaaatgggcttctccccatttatt

SEQ ID NO: 699 - RNA, 130 nt, synthetic construct
  source 1..130: mol_type = other RNA
ttggacaaggacccgatgccgtcatagttccattaaagccaaaagtggctttgatgtttctatgataagggtttcgacccgtggcgtcggggatcgcctgcccattgaaatgggcttctccccatttatt

SEQ ID NO: 700 - RNA, 130 nt, synthetic construct
  source 1..130: mol_type = other RNA
tggacaaggacccgatgcccgtcatagttccattaaagccaaaagtggctttgatgtttctatgataagggtttcgacccgtggcgtcggggatcgcctgcccattgaaatgggcttctccccatttatt

SEQ ID NO: 701 - RNA, 130 nt, synthetic construct
  source 1..130: mol_type = other RNA
tggggttgggcatcgggtccgtcatagttccattaaagccaaaagtggctttgatgtttctatgataagggtttcgacccgtggcgtcggggatcgcctgcccattgaaatgggcttctccccatttatt

SEQ ID NO: 702 - RNA, 130 nt, synthetic construct
  source 1..130: mol_type = other RNA
aaggacccgatgcccaacccgtcatagttccattaaagccaaaagtggctttgatgtttctatgataagggtttcgacccgtggcgtcggggatcgcctgcccattgaaatgggcttctccccatttatt

SEQ ID NO: 703 - RNA, 130 nt, synthetic construct
  source 1..130: mol_type = other RNA
caggcctggggttgggcatcgtcatagttccattaaagccaaaagtggctttgatgtttctatgataagggtttcgacccgtggcgtcggggatcgcctgcccattgaaatgggcttctccccatttatt

SEQ ID NO: 704 - RNA, 130 nt, synthetic construct
  source 1..130: mol_type = other RNA
atgcccaaccccaggcctgggtcatagttccattaaagccaaaagtggctttgatgtttctatgataagggtttcgacccgtggcgtcggggatcgcctgcccattgaaatgggcttctccccatttatt

SEQ ID NO: 705 - RNA, 130 nt, synthetic construct
  source 1..130: mol_type = other RNA
tgcccttggacaaggacccggtcatagttccattaaagccaaaagtggctttgatgtttctatgataagggtttcgacccgtggcgtcggggatcgcctgcccattgaaatgggcttctccccatttatt

SEQ ID NO: 706 - RNA, 130 nt, synthetic construct
  source 1..130: mol_type = other RNA
cttggacaaggacccgatgcgtcatagttccattaaagccaaaagtggctttgatgtttctatgataagggtttcgacccgtggcgtcggggatcgcctgcccattgaaatgggcttctccccatttatt

SEQ ID NO: 707 - RNA, 130 nt, synthetic construct
  source 1..130: mol_type = other RNA
tcctcttcttccttgaacccgtcatagttccattaaagccaaaagtggctttgatgtttctatgataagggtttcgacccgtggcgtcggggatcgcctgcccattgaaatgggcttctccccatttatt

SEQ ID NO: 708 - RNA, 130 nt, synthetic construct
  source 1..130: mol_type = other RNA
tcttcttccttgaaccccatgtcatagttccattaaagccaaaagtggctttgatgtttctatgataagggtttcgacccgtggcgtcggggatcgcctgcccattgaaatgggcttctccccatttatt

SEQ ID NO: 709 - RNA, 130 nt, synthetic construct
  source 1..130: mol_type = other RNA
cgcagcctgcccttggacaagtcatagttccattaaagccaaaagtggctttgatgtttctatgataagggtttcgacccgtggcgtcggggatcgcctgcccattgaaatgggcttctccccatttatt

SEQ ID NO: 710 - RNA, 130 nt, synthetic construct
  source 1..130: mol_type = other RNA
ggaaggggccgagggcttgcgtcatagttccattaaagccaaaagtggctttgatgtttctatgataagggtttcgacccgtggcgtcggggatcgcctgcccattgaaatgggcttctccccatttatt

SEQ ID NO: 711 - RNA, 130 nt, synthetic construct
  source 1..130: mol_type = other RNA
ggcctggcaagccctcggccgtcatagttccattaaagccaaaagtggctttgatgtttctatgataagggtttcgacccgtggcgtcggggatcgcctgcccattgaaatgggcttctccccatttatt

SEQ ID NO: 712 - RNA, 130 nt, synthetic construct
  source 1..130: mol_type = other RNA
gcaagccctcggccccttccgtcatagttccattaaagccaaaagtggctttgatgtttctatgataagggtttcgacccgtggcgtcggggatcgcctgcccattgaaatgggcttctccccatttatt

SEQ ID NO: 713 - RNA, 130 nt, synthetic construct
  source 1..130: mol_type = other RNA
atgggccaagggccaaggaagtcatagttccattaaagccaaaagtggctttgatgtttctatgataagggtttcgacccgtggcgtcggggatcgcctgcccattgaaatgggcttctccccatttatt

SEQ ID NO: 714 - RNA, 130 nt, synthetic construct
  source 1..130: mol_type = other RNA
cttggcccatccccaggagcgtcatagttccattaaagccaaaagtggctttgatgtttctatgataagggtttcgacccgtggcgtcggggatcgcctgcccattgaaatgggcttctccccatttatt

SEQ ID NO: 715 - RNA, 130 nt, synthetic construct
  source 1..130: mol_type = other RNA
cctcgcccagctggagggctgtcatagttccattaaagccaaaagtggctttgatgtttctatgataagggtttcgacccgtggcgtcggggatcgcctgcccattgaaatgggcttctccccatttatt

SEQ ID NO: 716 - RNA, 130 nt, synthetic construct
  source 1..130: mol_type = other RNA
gtctgaggctttgggtgcaggtcatagttccattaaagccaaaagtggctttgatgtttctatgataagggtttcgacccgtggcgtcggggatcgcctgcccattgaaatgggcttctccccatttatt

SEQ ID NO: 717 - RNA, 130 nt, synthetic construct
  source 1..130: mol_type = other RNA
caggtctgaggctttgggtggtcatagttccattaaagccaaaagtggctttgatgtttctatgataagggtttcgacccgtggcgtcggggatcgcctgcccattgaaatgggcttctccccatttatt

SEQ ID NO: 718 - RNA, 130 nt, synthetic construct
  source 1..130: mol_type = other RNA
aaggttccccctgggccccggtcatagttccattaaagccaaaagtggctttgatgtttctatgataagggtttcgacccgtggcgtcggggatcgcctgcccattgaaatgggcttctccccatttatt

SEQ ID NO: 719 - RNA, 130 nt, synthetic construct
  source 1..130: mol_type = other RNA
gaaggttccccctgggccccgtcatagttccattaaagccaaaagtggctttgatgtttctatgataagggtttcgacccgtggcgtcggggatcgcctgcccattgaaatgggcttctccccatttatt

SEQ ID NO: 720 - RNA, 130 nt, synthetic construct
  source 1..130: mol_type = other RNA
gccctggaaggttccccctggtcatagttccattaaagccaaaagtggctttgatgtttctatgataagggtttcgacccgtggcgtcggggatcgcctgcccattgaaatgggcttctccccatttatt

SEQ ID NO: 721 - RNA, 130 nt, synthetic construct
  source 1..130: mol_type = other RNA
gggcccagggggaaccttccgtcatagttccattaaagccaaaagtggctttgatgtttctatgataagggtttcgacccgtggcgtcggggatcgcctgcccattgaaatgggcttctccccatttatt

SEQ ID NO: 722 - RNA, 130 nt, synthetic construct
  source 1..130: mol_type = other RNA
agatctcggccctggaaggtgtcatagttccattaaagccaaaagtggctttgatgtttctatgataagggtttcgacccgtggcgtcggggatcgcctgcccattgaaatgggcttctccccatttatt

SEQ ID NO: 723 - RNA, 130 nt, synthetic construct
  source 1..130: mol_type = other RNA
aagatctcggccctggaagggtcatagttccattaaagccaaaagtggctttgatgtttctatgataagggtttcgacccgtggcgtcggggatcgcctgcccattgaaatgggcttctccccatttatt

SEQ ID NO: 724 - RNA, 130 nt, synthetic construct
  source 1..130: mol_type = other RNA
gaagatctcggccctggaaggtcatagttccattaaagccaaaagtggctttgatgtttctatgataagggtttcgacccgtggcgtcggggatcgcctgcccattgaaatgggcttctccccatttatt

SEQ ID NO: 725 - RNA, 130 nt, synthetic construct
  source 1..130: mol_type = other RNA
cgaagatctcggccctggaagtcatagttccattaaagccaaaagtggctttgatgtttctatgataagggtttcgacccgtggcgtcggggatcgcctgcccattgaaatgggcttctccccatttatt

SEQ ID NO: 726 - RNA, 130 nt, synthetic construct
  source 1..130: mol_type = other RNA
agggccgagatcttcgaggcgtcatagttccattaaagccaaaagtggctttgatgtttctatgataagggtttcgacccgtggcgtcggggatcgcctgcccattgaaatgggcttctccccatttatt

SEQ ID NO: 727 - RNA, 130 nt, synthetic construct
  source 1..130: mol_type = other RNA
gggccccgcctcgaagatctgtcatagttccattaaagccaaaagtggctttgatgtttctatgataagggtttcgacccgtggcgtcggggatcgcctgcccattgaaatgggcttctccccatttatt

SEQ ID NO: 728 - RNA, 130 nt, synthetic construct
  source 1..130: mol_type = other RNA
gggccgagatcttcgaggcggtcatagttccattaaagccaaaagtggctttgatgtttctatgataagggtttcgacccgtggcgtcggggatcgcctgcccattgaaatgggcttctccccatttatt

SEQ ID NO: 729 - RNA, 130 nt, synthetic construct
  source 1..130: mol_type = other RNA
tgggccccgcctcgaagatcgtcatagttccattaaagccaaaagtggctttgatgtttctatgataagggtttcgacccgtggcgtcggggatcgcctgcccattgaaatgggcttctccccatttatt

SEQ ID NO: 730 - RNA, 130 nt, synthetic construct
  source 1..130: mol_type = other RNA
gagatcttcgaggcggggccgtcatagttccattaaagccaaaagtggctttgatgtttctatgataagggtttcgacccgtggcgtcggggatcgcctgcccattgaaatgggcttctccccatttatt

SEQ ID NO: 731 - RNA, 130 nt, synthetic construct
  source 1..130: mol_type = other RNA
atcttcgaggcggggcccatgtcatagttccattaaagccaaaagtggctttgatgtttctatgataagggtttcgacccgtggcgtcggggatcgcctgcccattgaaatgggcttctccccatttatt

SEQ ID NO: 732 - RNA, 130 nt, synthetic construct
  source 1..130: mol_type = other RNA
gcggggcccatgcctcctctgtcatagttccattaaagccaaaagtggctttgatgtttctatgataagggtttcgacccgtggcgtcggggatcgcctgcccattgaaatgggcttctccccatttatt

SEQ ID NO: 733 - RNA, 135 nt, synthetic construct
  source 1..135: mol_type = other RNA
cttgccaggcctggggttgggcatcgtcatagttccattaaagccaaaagtggctttgatgtttctatgataagggtttcgacccgtggcgtcggggatcgcctgcccattgaaatgggcttctccccatttatt

SEQ ID NO: 734 - RNA, 135 nt, synthetic construct
  source 1..135: mol_type = other RNA
acccgatgcccaaccccaggcctgggtcatagttccattaaagccaaaagtggctttgatgtttctatgataagggtttcgacccgtggcgtcggggatcgcctgcccattgaaatgggcttctccccatttatt

SEQ ID NO: 735 - RNA, 135 nt, synthetic construct
  source 1..135: mol_type = other RNA
gccaaggaaggggccgagggcttgcgtcatagttccattaaagccaaaagtggctttgatgtttctatgataagggtttcgacccgtggcgtcggggatcgcctgcccattgaaatgggcttctccccatttatt

SEQ ID NO: 736 - RNA, 135 nt, synthetic construct
  source 1..135: mol_type = other RNA
agcaggtctgaggctttgggtgcaggtcatagttccattaaagccaaaagtggctttgatgtttctatgataagggtttcgacccgtggcgtcggggatcgcctgcccattgaaatgggcttctccccatttatt

SEQ ID NO: 737 - RNA, 135 nt, synthetic construct
  source 1..135: mol_type = other RNA
tctcggccctggaaggttccccctggtcatagttccattaaagccaaaagtggctttgatgtttctatgataagggtttcgacccgtggcgtcggggatcgcctgcccattgaaatgggcttctccccatttatt

SEQ ID NO: 738 - RNA, 135 nt, synthetic construct
  source 1..135: mol_type = other RNA
ctcgaagatctcggccctggaaggtgtcatagttccattaaagccaaaagtggctttgatgtttctatgataagggtttcgacccgtggcgtcggggatcgcctgcccattgaaatgggcttctccccatttatt

SEQ ID NO: 739 - RNA, 135 nt, synthetic construct
  source 1..135: mol_type = other RNA
cctcgaagatctcggccctggaagggtcatagttccattaaagccaaaagtggctttgatgtttctatgataagggtttcgacccgtggcgtcggggatcgcctgcccattgaaatgggcttctccccatttatt

SEQ ID NO: 740 - RNA, 110 nt, synthetic construct
  source 1..110: mol_type = other RNA
ttgccaggcctggggttgggcatcgtcatagttccataaagatgtttctatgataagggtttcgacccgtggcgtcggggatcgcctgcccttgaaagggcttctcccca

SEQ ID NO: 741 - RNA, 110 nt, synthetic construct
  source 1..110: mol_type = other RNA
gcaggtctgaggctttgggtgcaggtcatagttccataaagatgtttctatgataagggtttcgacccgtggcgtcggggatcgcctgcccttgaaagggcttctcccca

SEQ ID NO: 742 - RNA, 110 nt, synthetic construct
  source 1..110: mol_type = other RNA
ctcgaagatctcggccctggaagggtcatagttccataaagatgtttctatgataagggtttcgacccgtggcgtcggggatcgcctgcccttgaaagggcttctcccca

SEQ ID NO: 743 - RNA, 135 nt, synthetic construct
  source 1..135: mol_type = other RNA
agccctcggccccttccttggccctgtcatagttccattaaagccaaaagtggctttgatgtttctatgataagggtttcgacccgtggcgtcggggatcgcctgcccattgaaatgggcttctccccatttatt

SEQ ID NO: 744 - RNA, 135 nt, synthetic construct
  source 1..135: mol_type = other RNA
agctggagggctgcacccaaagcctgtcatagttccattaaagccaaaagtggctttgatgtttctatgataagggtttcgacccgtggcgtcggggatcgcctgcccattgaaatgggcttctccccatttatt

SEQ ID NO: 745 - RNA, 135 nt, synthetic construct
  source 1..135: mol_type = other RNA
aggcatgggccccgcctcgaagatcgtcatagttccattaaagccaaaagtggctttgatgtttctatgataagggtttcgacccgtggcgtcggggatcgcctgcccattgaaatgggcttctccccatttatt

SEQ ID NO: 746 - RNA, 135 nt, synthetic construct
  source 1..135: mol_type = other RNA
caagggccaaggaaggggccgaggggtcatagttccattaaagccaaaagtggctttgatgtttctatgataagggtttcgacccgtggcgtcggggatcgcctgcccattgaaatgggcttctccccatttatt

SEQ ID NO: 747 - RNA, 135 nt, synthetic construct
  source 1..135: mol_type = other RNA
ccaaccccaggcctggcaagccctcgtcatagttccattaaagccaaaagtggctttgatgtttctatgataagggtttcgacccgtggcgtcggggatcgcctgcccattgaaatgggcttctccccatttatt

SEQ ID NO: 748 - RNA, 135 nt, synthetic construct
  source 1..135: mol_type = other RNA
ccccagcaggtctgaggctttgggtgtcatagttccattaaagccaaaagtggctttgatgtttctatgataagggtttcgacccgtggcgtcggggatcgcctgcccattgaaatgggcttctccccatttatt

SEQ ID NO: 749 - RNA, 135 nt, synthetic construct
  source 1..135: mol_type = other RNA
cccgatgcccaaccccaggcctggcgtcatagttccattaaagccaaaagtggctttgatgtttctatgataagggtttcgacccgtggcgtcggggatcgcctgcccattgaaatgggcttctccccatttatt

SEQ ID NO: 750 - RNA, 135 nt, synthetic construct
  source 1..135: mol_type = other RNA
ccgagatcttcgaggcggggcccatgtcatagttccattaaagccaaaagtggctttgatgtttctatgataagggtttcgacccgtggcgtcggggatcgcctgcccattgaaatgggcttctccccatttatt

SEQ ID NO: 751 - RNA, 135 nt, synthetic construct
  source 1..135: mol_type = other RNA
cctcctcttcttccttgaaccccatgtcatagttccattaaagccaaaagtggctttgatgtttctatgataagggtttcgacccgtggcgtcggggatcgcctgcccattgaaatgggcttctccccatttatt

SEQ ID NO: 752 - RNA, 135 nt, synthetic construct
  source 1..135: mol_type = other RNA
cctggcaagccctcggccccttcctgtcatagttccattaaagccaaaagtggctttgatgtttctatgataagggtttcgacccgtggcgtcggggatcgcctgcccattgaaatgggcttctccccatttatt

SEQ ID NO: 753 - RNA, 135 nt, synthetic construct
  source 1..135: mol_type = other RNA
cggccccttccttggcccttggcccgtcatagttccattaaagccaaaagtggctttgatgtttctatgataagggtttcgacccgtggcgtcggggatcgcctgcccattgaaatgggcttctccccatttatt

SEQ ID NO: 754 - RNA, 135 nt, synthetic construct
  source 1..135: mol_type = other RNA
ctcgcccagctggagggctgcacccgtcatagttccattaaagccaaaagtggctttgatgtttctatgataagggtttcgacccgtggcgtcggggatcgcctgcccattgaaatgggcttctccccatttatt

SEQ ID NO: 755 - RNA, 135 nt, synthetic construct
  source 1..135: mol_type = other RNA
ctcggccccttccttggcccttggcgtcatagttccattaaagccaaaagtggctttgatgtttctatgataagggtttcgacccgtggcgtcggggatcgcctgcccattgaaatgggcttctccccatttatt

SEQ ID NO: 756 - RNA, 135 nt, synthetic construct
  source 1..135: mol_type = other RNA
ctgggggcccggggcccagggggaagtcatagttccattaaagccaaaagtggctttgatgtttctatgataagggtttcgacccgtggcgtcggggatcgcctgcccattgaaatgggcttctccccatttatt

SEQ ID NO: 757 - RNA, 135 nt, synthetic construct
  source 1..135: mol_type = other RNA
gatctcggccctggaaggttcccccgtcatagttccattaaagccaaaagtggctttgatgtttctatgataagggtttcgacccgtggcgtcggggatcgcctgcccattgaaatgggcttctccccatttatt

SEQ ID NO: 758 - RNA, 135 nt, synthetic construct
  source 1..135: mol_type = other RNA
gcacccaaagcctcagacctgctgggtcatagttccattaaagccaaaagtggctttgatgtttctatgataagggtttcgacccgtggcgtcggggatcgcctgcccattgaaatgggcttctccccatttatt

SEQ ID NO: 759 - RNA, 135 nt, synthetic construct
  source 1..135: mol_type = other RNA
gcccaaccccaggcctggcaagcccgtcatagttccattaaagccaaaagtggctttgatgtttctatgataagggtttcgacccgtggcgtcggggatcgcctgcccattgaaatgggcttctccccatttatt

SEQ ID NO: 760 - RNA, 135 nt, synthetic construct
  source 1..135: mol_type = other RNA
gccctggaaggttccccctgggcccgtcatagttccattaaagccaaaagtggctttgatgtttctatgataagggtttcgacccgtggcgtcggggatcgcctgcccattgaaatgggcttctccccatttatt

SEQ ID NO: 761 - RNA, 135 nt, synthetic construct
  source 1..135: mol_type = other RNA
ggcccatgcctcctcttcttccttggtcatagttccattaaagccaaaagtggctttgatgtttctatgataagggtttcgacccgtggcgtcggggatcgcctgcccattgaaatgggcttctccccatttatt

SEQ ID NO: 762 - RNA, 135 nt, synthetic construct
  source 1..135: mol_type = other RNA
ggcccttggcccatccccaggagccgtcatagttccattaaagccaaaagtggctttgatgtttctatgataagggtttcgacccgtggcgtcggggatcgcctgcccattgaaatgggcttctccccatttatt

SEQ ID NO: 763 - RNA, 135 nt, synthetic construct
  source 1..135: mol_type = other RNA
gggccgagatcttcgaggcggggccgtcatagttccattaaagccaaaagtggctttgatgtttctatgataagggtttcgacccgtggcgtcggggatcgcctgcccattgaaatgggcttctccccatttatt

SEQ ID NO: 764 - RNA, 135 nt, synthetic construct
  source 1..135: mol_type = other RNA
gggcgaggctcctggggatgggccagtcatagttccattaaagccaaaagtggctttgatgtttctatgataagggtttcgacccgtggcgtcggggatcgcctgcccattgaaatgggcttctccccatttatt

SEQ ID NO: 765 - RNA, 135 nt, synthetic construct
  source 1..135: mol_type = other RNA
ggggcccatgcctcctcttcttcctgtcatagttccattaaagccaaaagtggctttgatgtttctatgataagggtttcgacccgtggcgtcggggatcgcctgcccattgaaatgggcttctccccatttatt

SEQ ID NO: 766 - RNA, 135 nt, synthetic construct
  source 1..135: mol_type = other RNA
ggggttcaaggaagaagaggaggcagtcatagttccattaaagccaaaagtggctttgatgtttctatgataagggtttcgacccgtggcgtcggggatcgcctgcccattgaaatgggcttctccccatttatt

SEQ ID NO: 767 - RNA, 135 nt, synthetic construct
  source 1..135: mol_type = other RNA
ggttcaaggaagaagaggaggcatggtcatagttccattaaagccaaaagtggctttgatgtttctatgataagggtttcgacccgtggcgtcggggatcgcctgcccattgaaatgggcttctccccatttatt

SEQ ID NO: 768 - RNA, 135 nt, synthetic construct
  source 1..135: mol_type = other RNA
tcaaggaagaagaggaggcatgggcgtcatagttccattaaagccaaaagtggctttgatgtttctatgataagggtttcgacccgtggcgtcggggatcgcctgcccattgaaatgggcttctccccatttatt

SEQ ID NO: 769 - RNA, 135 nt, synthetic construct
  source 1..135: mol_type = other RNA
tccagctgggcgaggctcctggggagtcatagttccattaaagccaaaagtggctttgatgtttctatgataagggtttcgacccgtggcgtcggggatcgcctgcccattgaaatgggcttctccccatttatt

SEQ ID NO: 770 - RNA, 135 nt, synthetic construct
  source 1..135: mol_type = other RNA
tcgaggcggggcccatgcctcctctgtcatagttccattaaagccaaaagtggctttgatgtttctatgataagggtttcgacccgtggcgtcggggatcgcctgcccattgaaatgggcttctccccatttatt

SEQ ID NO: 771 - RNA, 135 nt, synthetic construct
  source 1..135: mol_type = other RNA
tgggtgcagccctccagctgggcgagtcatagttccattaaagccaaaagtggctttgatgtttctatgataagggtttcgacccgtggcgtcggggatcgcctgcccattgaaatgggcttctccccatttatt

SEQ ID NO: 772 - RNA, 135 nt, synthetic construct
  source 1..135: mol_type = other RNA
ttccagggccgagatcttcgaggcggtcatagttccattaaagccaaaagtggctttgatgtttctatgataagggtttcgacccgtggcgtcggggatcgcctgcccattgaaatgggcttctccccatttatt

SEQ ID NO: 773 - RNA, 135 nt, synthetic construct
  source 1..135: mol_type = other RNA
aagcctcagacctgctgggggcccggtcatagttccattaaagccaaaagtggctttgatgtttctatgataagggtttcgacccgtggcgtcggggatcgcctgcccattgaaatgggcttctccccatttatt

SEQ ID NO: 774 - RNA, 119 nt, synthetic construct
  source 1..119: mol_type = other RNA
cttgccaggcctggggttgggcatcgtcatagttccattaaaaagttgatgtttctatgataagggtttcgacccgtggcgtcggggatcgcctgcccttgaaagggcttctccccatt

SEQ ID NO: 775 - RNA, 118 nt, synthetic construct
  source 1..118: mol_type = other RNA
ttgccaggcctggggttgggcatcgtcatagttccattaaaaagttgatgtttctatgataagggtttcgacccgtggcgtcggggatcgcctgcccttgaaagggcttctccccatt

SEQ ID NO: 776 - RNA, 116 nt, synthetic construct
  source 1..116: mol_type = other RNA
gccaggcctggggttgggcatcgtcatagttccattaaaaagttgatgtttctatgataagggtttcgacccgtggcgtcggggatcgcctgcccttgaaagggcttctccccatt

SEQ ID NO: 777 - RNA, 119 nt, synthetic construct
  source 1..119: mol_type = other RNA
agcaggtctgaggctttgggtgcaggtcatagttccattaaaaagttgatgtttctatgataagggtttcgacccgtggcgtcggggatcgcctgcccttgaaagggcttctccccatt

SEQ ID NO: 778 - RNA, 118 nt, synthetic construct
  source 1..118: mol_type = other RNA
gcaggtctgaggctttgggtgcaggtcatagttccattaaaaagttgatgtttctatgataagggtttcgacccgtggcgtcggggatcgcctgcccttgaaagggcttctccccatt

SEQ ID NO: 779 - RNA, 116 nt, synthetic construct
  source 1..116: mol_type = other RNA
aggtctgaggctttgggtgcaggtcatagttccattaaaaagttgatgtttctatgataagggtttcgacccgtggcgtcggggatcgcctgcccttgaaagggcttctccccatt

SEQ ID NO: 780 - RNA, 119 nt, synthetic construct
  source 1..119: mol_type = other RNA
tctcggccctggaaggttccccctggtcatagttccattaaaaagttgatgtttctatgataagggtttcgacccgtggcgtcggggatcgcctgcccttgaaagggcttctccccatt

SEQ ID NO: 781 - RNA, 118 nt, synthetic construct
  source 1..118: mol_type = other RNA
ctcggccctggaaggttccccctggtcatagttccattaaaaagttgatgtttctatgataagggtttcgacccgtggcgtcggggatcgcctgcccttgaaagggcttctccccatt

SEQ ID NO: 782 - RNA, 117 nt, synthetic construct
  source 1..117: mol_type = other RNA
tcggccctggaaggttccccctggtcatagttccattaaaaagttgatgtttctatgataagggtttcgacccgtggcgtcggggatcgcctgcccttgaaagggcttctccccatt

SEQ ID NO: 783 - RNA, 116 nt, synthetic construct
  source 1..116: mol_type = other RNA
cggccctggaaggttccccctggtcatagttccattaaaaagttgatgtttctatgataagggtttcgacccgtggcgtcggggatcgcctgcccttgaaagggcttctccccatt

SEQ ID NO: 784 - RNA, 119 nt, synthetic construct
  source 1..119: mol_type = other RNA
cctcgaagatctcggccctggaagggtcatagttccattaaaaagttgatgtttctatgataagggtttcgacccgtggcgtcggggatcgcctgcccttgaaagggcttctccccatt

SEQ ID NO: 785 - RNA, 118 nt, synthetic construct
  source 1..118: mol_type = other RNA
ctcgaagatctcggccctggaagggtcatagttccattaaaaagttgatgtttctatgataagggtttcgacccgtggcgtcggggatcgcctgcccttgaaagggcttctccccatt

SEQ ID NO: 786 - RNA, 116 nt, synthetic construct
  source 1..116: mol_type = other RNA
cgaagatctcggccctggaagggtcatagttccattaaaaagttgatgtttctatgataagggtttcgacccgtggcgtcggggatcgcctgcccttgaaagggcttctccccatt

SEQ ID NO: 787 - RNA, 110 nt, synthetic construct
  source 1..110: mol_type = other RNA
ctcggccctggaaggttccccctggtcatagttccataaagatgtttctatgataagggtttcgacccgtggcgtcggggatcgcctgcccttgaaagggcttctcccca

SEQ ID NO: 788 - RNA, 123 nt, synthetic construct
  source 1..123: mol_type = other RNA
cttgccaggcctggggttgggcatcgtcatagttccattaaaagtgatgtttctatgataagggtttcgacccgtggcgtcggggatcgcctgcccattgaaatgggcttctccccatttatt

SEQ ID NO: 789 - RNA, 117 nt, synthetic construct
  source 1..117: mol_type = other RNA
cttgccaggcctggggttgggcatcgtcatagttccattaaaagtgatgtttctatgataagggtttcgacccgtggcgtcggggatcgcctgcccattgaaatgggcttctcccca

SEQ ID NO: 790 - RNA, 115 nt, synthetic construct
  source 1..115: mol_type = other RNA
cttgccaggcctggggttgggcatcgtcatagttccattaaaagtgatgtttctatgataagggtttcgacccgtggcgtcggggatcgcctgcccttgaaagggcttctcccca

SEQ ID NO: 791 - RNA, 121 nt, synthetic construct
  source 1..121: mol_type = other RNA
cttgccaggcctggggttgggcatcgtcatagttccattaaaggatgtttctatgataagggtttcgacccgtggcgtcggggatcgcctgcccattgaaatgggcttctccccatttatt

SEQ ID NO: 792 - RNA, 115 nt, synthetic construct
  source 1..115: mol_type = other RNA
cttgccaggcctggggttgggcatcgtcatagttccattaaaggatgtttctatgataagggtttcgacccgtggcgtcggggatcgcctgcccattgaaatgggcttctcccca

SEQ ID NO: 793 - RNA, 113 nt, synthetic construct
  source 1..113: mol_type = other RNA
cttgccaggcctggggttgggcatcgtcatagttccattaaaggatgtttctatgataagggtttcgacccgtggcgtcggggatcgcctgcccttgaaagggcttctcccca

SEQ ID NO: 794 - RNA, 119 nt, synthetic construct
  source 1..119: mol_type = other RNA
cttgccaggcctggggttgggcatcgtcatagttccataaagatgtttctatgataagggtttcgacccgtggcgtcggggatcgcctgcccattgaaatgggcttctccccatttatt

SEQ ID NO: 795 - RNA, 113 nt, synthetic construct
  source 1..113: mol_type = other RNA
cttgccaggcctggggttgggcatcgtcatagttccataaagatgtttctatgataagggtttcgacccgtggcgtcggggatcgcctgcccattgaaatgggcttctcccca

SEQ ID NO: 796 - RNA, 111 nt, synthetic construct
  source 1..111: mol_type = other RNA
cttgccaggcctggggttgggcatcgtcatagttccataaagatgtttctatgataagggtttcgacccgtggcgtcggggatcgcctgcccttgaaagggcttctcccca

SEQ ID NO: 797 - RNA, 123 nt, synthetic construct
  source 1..123: mol_type = other RNA
agcaggtctgaggctttgggtgcaggtcatagttccattaaaagtgatgtttctatgataagggtttcgacccgtggcgtcggggatcgcctgcccattgaaatgggcttctccccatttatt

SEQ ID NO: 798 - RNA, 117 nt, synthetic construct
  source 1..117: mol_type = other RNA
agcaggtctgaggctttgggtgcaggtcatagttccattaaaagtgatgtttctatgataagggtttcgacccgtggcgtcggggatcgcctgcccattgaaatgggcttctcccca

SEQ ID NO: 799 - RNA, 115 nt, synthetic construct
  source 1..115: mol_type = other RNA
agcaggtctgaggctttgggtgcaggtcatagttccattaaaagtgatgtttctatgataagggtttcgacccgtggcgtcggggatcgcctgcccttgaaagggcttctcccca

SEQ ID NO: 800 - RNA, 121 nt, synthetic construct
  source 1..121: mol_type = other RNA
agcaggtctgaggctttgggtgcaggtcatagttccattaaaggatgtttctatgataagggtttcgacccgtggcgtcggggatcgcctgcccattgaaatgggcttctccccatttatt

SEQ ID NO: 801 - RNA, 115 nt, synthetic construct
  source 1..115: mol_type = other RNA
agcaggtctgaggctttgggtgcaggtcatagttccattaaaggatgtttctatgataagggtttcgacccgtggcgtcggggatcgcctgcccattgaaatgggcttctcccca

SEQ ID NO: 802 - RNA, 113 nt, synthetic construct
  source 1..113: mol_type = other RNA
agcaggtctgaggctttgggtgcaggtcatagttccattaaaggatgtttctatgataagggtttcgacccgtggcgtcggggatcgcctgcccttgaaagggcttctcccca

SEQ ID NO: 803 - RNA, 119 nt, synthetic construct
  source 1..119: mol_type = other RNA
agcaggtctgaggctttgggtgcaggtcatagttccataaagatgtttctatgataagggtttcgacccgtggcgtcggggatcgcctgcccattgaaatgggcttctccccatttatt

SEQ ID NO: 804 - RNA, 113 nt, synthetic construct
  source 1..113: mol_type = other RNA
agcaggtctgaggctttgggtgcaggtcatagttccataaagatgtttctatgataagggtttcgacccgtggcgtcggggatcgcctgcccattgaaatgggcttctcccca

SEQ ID NO: 805 - RNA, 111 nt, synthetic construct
  source 1..111: mol_type = other RNA
agcaggtctgaggctttgggtgcaggtcatagttccataaagatgtttctatgataagggtttcgacccgtggcgtcggggatcgcctgcccttgaaagggcttctcccca

SEQ ID NO: 806 - RNA, 123 nt, synthetic construct
  source 1..123: mol_type = other RNA
tctcggccctggaaggttccccctggtcatagttccattaaaagtgatgtttctatgataagggtttcgacccgtggcgtcggggatcgcctgcccattgaaatgggcttctccccatttatt

SEQ ID NO: 807 - RNA, 117 nt, synthetic construct
  source 1..117: mol_type = other RNA
tctcggccctggaaggttccccctggtcatagttccattaaaagtgatgtttctatgataagggtttcgacccgtggcgtcggggatcgcctgcccattgaaatgggcttctcccca

SEQ ID NO: 808 - RNA, 115 nt, synthetic construct
  source 1..115: mol_type = other RNA
tctcggccctggaaggttccccctggtcatagttccattaaaagtgatgtttctatgataagggtttcgacccgtggcgtcggggatcgcctgcccttgaaagggcttctcccca

SEQ ID NO: 809 - RNA, 121 nt, synthetic construct
  source 1..121: mol_type = other RNA
tctcggccctggaaggttccccctggtcatagttccattaaaggatgtttctatgataagggtttcgacccgtggcgtcggggatcgcctgcccattgaaatgggcttctccccatttatt

SEQ ID NO: 810 - RNA, 115 nt, synthetic construct
  source 1..115: mol_type = other RNA
tctcggccctggaaggttccccctggtcatagttccattaaaggatgtttctatgataagggtttcgacccgtggcgtcggggatcgcctgcccattgaaatgggcttctcccca

SEQ ID NO: 811 - RNA, 113 nt, synthetic construct
  source 1..113: mol_type = other RNA
tctcggccctggaaggttccccctggtcatagttccattaaaggatgtttctatgataagggtttcgacccgtggcgtcggggatcgcctgcccttgaaagggcttctcccca

SEQ ID NO: 812 - RNA, 113 nt, synthetic construct
  source 1..113: mol_type = other RNA
tctcggccctggaaggttccccctggtcatagttccataaagatgtttctatgataagggtttcgacccgtggcgtcggggatcgcctgcccattgaaatgggcttctcccca

SEQ ID NO: 813 - RNA, 111 nt, synthetic construct
  source 1..111: mol_type = other RNA
tctcggccctggaaggttccccctggtcatagttccataaagatgtttctatgataagggtttcgacccgtggcgtcggggatcgcctgcccttgaaagggcttctcccca

SEQ ID NO: 814 - RNA, 123 nt, synthetic construct
  source 1..123: mol_type = other RNA
cctcgaagatctcggccctggaagggtcatagttccattaaaagtgatgtttctatgataagggtttcgacccgtggcgtcggggatcgcctgcccattgaaatgggcttctccccatttatt

SEQ ID NO: 815 - RNA, 117 nt, synthetic construct
  source 1..117: mol_type = other RNA
cctcgaagatctcggccctggaagggtcatagttccattaaaagtgatgtttctatgataagggtttcgacccgtggcgtcggggatcgcctgcccattgaaatgggcttctcccca

SEQ ID NO: 816 - RNA, 115 nt, synthetic construct
  source 1..115: mol_type = other RNA
cctcgaagatctcggccctggaagggtcatagttccattaaaagtgatgtttctatgataagggtttcgacccgtggcgtcggggatcgcctgcccttgaaagggcttctcccca

SEQ ID NO: 817 - RNA, 121 nt, synthetic construct
  source 1..121: mol_type = other RNA
cctcgaagatctcggccctggaagggtcatagttccattaaaggatgtttctatgataagggtttcgacccgtggcgtcggggatcgcctgcccattgaaatgggcttctccccatttatt

SEQ ID NO: 818 - RNA, 115 nt, synthetic construct
  source 1..115: mol_type = other RNA
cctcgaagatctcggccctggaagggtcatagttccattaaaggatgtttctatgataagggtttcgacccgtggcgtcggggatcgcctgcccattgaaatgggcttctcccca

SEQ ID NO: 819 - RNA, 113 nt, synthetic construct
  source 1..113: mol_type = other RNA
cctcgaagatctcggccctggaagggtcatagttccattaaaggatgtttctatgataagggtttcgacccgtggcgtcggggatcgcctgcccttgaaagggcttctcccca

SEQ ID NO: 820 - RNA, 119 nt, synthetic construct
  source 1..119: mol_type = other RNA
cctcgaagatctcggccctggaagggtcatagttccataaagatgtttctatgataagggtttcgacccgtggcgtcggggatcgcctgcccattgaaatgggcttctccccatttatt

SEQ ID NO: 821 - RNA, 113 nt, synthetic construct
  source 1..113: mol_type = other RNA
cctcgaagatctcggccctggaagggtcatagttccataaagatgtttctatgataagggtttcgacccgtggcgtcggggatcgcctgcccattgaaatgggcttctcccca

SEQ ID NO: 822 - RNA, 111 nt, synthetic construct
  source 1..111: mol_type = other RNA
cctcgaagatctcggccctggaagggtcatagttccataaagatgtttctatgataagggtttcgacccgtggcgtcggggatcgcctgcccttgaaagggcttctcccca

SEQ ID NO: 823 - RNA, 119 nt, synthetic construct
  source 1..119: mol_type = other RNA
ggggttcaaggaagaagaggaggcagtcatagttccattaaaaagttgatgtttctatgataagggtttcgacccgtggcgtcggggatcgcctgcccttgaaagggcttctccccatt

SEQ ID NO: 824 - RNA, 118 nt, synthetic construct
  source 1..118: mol_type = other RNA
gggttcaaggaagaagaggaggcagtcatagttccattaaaaagttgatgtttctatgataagggtttcgacccgtggcgtcggggatcgcctgcccttgaaagggcttctccccatt

SEQ ID NO: 825 - RNA, 118 nt, synthetic construct
  source 1..118: mol_type = other RNA
gggttcaaggaagaagaggaggcagtcatagttccataaagatgtttctatgataagggtttcgacccgtggcgtcggggatcgcctgcccattgaaatgggcttctccccatttatt

SEQ ID NO: 826 - RNA, 117 nt, synthetic construct
  source 1..117: mol_type = other RNA
ggttcaaggaagaagaggaggcagtcatagttccataaagatgtttctatgataagggtttcgacccgtggcgtcggggatcgcctgcccattgaaatgggcttctccccatttatt

SEQ ID NO: 827 - RNA, 118 nt, synthetic construct
  source 1..118: mol_type = other RNA
ttgccaggcctggggttgggcatcgtcatagttccataaagatgtttctatgataagggtttcgacccgtggcgtcggggatcgcctgcccattgaaatgggcttctccccatttatt

SEQ ID NO: 828 - RNA, 117 nt, synthetic construct
  source 1..117: mol_type = other RNA
tgccaggcctggggttgggcatcgtcatagttccataaagatgtttctatgataagggtttcgacccgtggcgtcggggatcgcctgcccattgaaatgggcttctccccatttatt

SEQ ID NO: 829 - RNA, 118 nt, synthetic construct
  source 1..118: mol_type = other RNA
gcaggtctgaggctttgggtgcaggtcatagttccataaagatgtttctatgataagggtttcgacccgtggcgtcggggatcgcctgcccattgaaatgggcttctccccatttatt

SEQ ID NO: 830 - RNA, 117 nt, synthetic construct
  source 1..117: mol_type = other RNA
caggtctgaggctttgggtgcaggtcatagttccataaagatgtttctatgataagggtttcgacccgtggcgtcggggatcgcctgcccattgaaatgggcttctccccatttatt

SEQ ID NO: 831 - RNA, 118 nt, synthetic construct
  source 1..118: mol_type = other RNA
ctcggccctggaaggttccccctggtcatagttccataaagatgtttctatgataagggtttcgacccgtggcgtcggggatcgcctgcccattgaaatgggcttctccccatttatt

SEQ ID NO: 832 - RNA, 117 nt, synthetic construct
  source 1..117: mol_type = other RNA
tcggccctggaaggttccccctggtcatagttccataaagatgtttctatgataagggtttcgacccgtggcgtcggggatcgcctgcccattgaaatgggcttctccccatttatt

SEQ ID NO: 833 - RNA, 118 nt, synthetic construct
  source 1..118: mol_type = other RNA
ctcgaagatctcggccctggaagggtcatagttccataaagatgtttctatgataagggtttcgacccgtggcgtcggggatcgcctgcccattgaaatgggcttctccccatttatt

SEQ ID NO: 834 - RNA, 117 nt, synthetic construct
  source 1..117: mol_type = other RNA
tcgaagatctcggccctggaagggtcatagttccataaagatgtttctatgataagggtttcgacccgtggcgtcggggatcgcctgcccattgaaatgggcttctccccatttatt

SEQ ID NO: 835 - protein, 1368 aa, Streptococcus pyogenes
MDKKYSIGLDIGTNSVGWAVITDDYKVPSKKLKGLGNTDRHGIKKNLIGALLFDSGETAEATRLKRTARRRYTRRKNRICYLQEIFSNEMAKVDDSFFHRLEESFLVEEDKKHERHPIFGNIVDEVAYHEKYPTIYHLRKKLADSTDKVDLRLIYLALAHMIKFRGHFLIEGDLNPDNSDVDKLFIQLVQTYNQLFEENPINASRVDAKAILSARLSKSRRLENLIAQLPGEKKNGLFGNLIALSLGLTPNFKSNFDLAEDAKLQLSKDTYDDDLDNLLAQIGDQYADLFLAAKNLSDATLLSDILRVNSEITKAPLSASMIKRYDEHHQDLTLLKALVRQQLPEKYKEIFFDQSKNGYAGYIDGGASQEEFYKFIKPILEKMDGTEELLAKLNREDLLRKQRTFDNGSIPYQIHLGELHAILRRQEDFYPFLKDNREKIEKILTFRIPYYVGPLARGNSRFAWMTRKSEETITPWNFEEVVDKGASAQSFIERMTNFDKNLPNEKVLPKHSLLYEYFTVYNELTKVKYVTEGMRKPAFLSGEQKKAIVDLLFKTNRKVTVKQLKEDYFKKIECFDSVEISGVEDRFNASLGTYHDLLKIIKDKDFLDNEENEDILEDIVLTLTLFEDREMIEERLKTYAHLFDDKVMKQLKRRRYTGWGRLSRKLINGIRDKQSGKTILDFLKSDGFANRNFMQLIHDDSLTFKEDIQKAQVSGQGDSLHEHIANLAGSPAIKKGILQTVKVVDELVKVMGRHKPENIVIEMARENQTTQKGQKNSRERMKRIEEGIKELGSDILKEYPVENTQLQNEKLYLYYLQNGRDMYVDQELDINRLSDYDVDHIVPQSFLKDDSIDNKVLTRSDKNRGKSDNVPSEEVVKKMKNYWRQLLNAKLITQRKFDNLTKAERGGLSELDKVGFIKRQLVETRQITKHVAQILDSRMNTKYDENDKLIREVRVITLKSKLVSDFRKDFQFYKVREINNYHHAHDAYLNAVVGTALIKKYPKLESEFVYGDYKVYDVRKMIAKSEQEIGKATAKYFFYSNIMNFFKTEITLANGEIRKRPLIETNGETGEIVWDKGRDFATVRKVLSMPQVNIVKKTEVQTGGFSKESILPKRNSDKLIARKKDWDPKKYGGFDSPTVAYSVLVVAKVEKGKSKKLKSVKELLGITIMERSSFEKDPIDFLEAKGYKEVRKDLIIKLPKYSLFELENGRKRMLASAGELQKGNELALPSKYVNFLYLASHYEKLKGSPEDNEQKQLFVEQHKHYLDEIIEQISEFSKRVILADANLDKVLSAYNKHRDKPIREQAENIIHLFTLTNLGAPAAFKYFDTTIDRKRYTSTKEVLDATLIHQSITGLYETRIDLSQLGGD

SEQ ID NO: 836 - protein, 1368 aa, Streptococcus pyogenes
MDKKYSIGLAIGTNSVGWAVITDDYKVPSKKLKGLGNTDRHGIKKNLIGALLFDSGETAEATRLKRTARRRYTRRKNRICYLQEIFSNEMAKVDDSFFHRLEESFLVEEDKKHERHPIFGNIVDEVAYHEKYPTIYHLRKKLADSTDKVDLRLIYLALAHMIKFRGHFLIEGDLNPDNSDVDKLFIQLVQTYNQLFEENPINASRVDAKAILSARLSKSRRLENLIAQLPGEKKNGLFGNLIALSLGLTPNFKSNFDLAEDAKLQLSKDTYDDDLDNLLAQIGDQYADLFLAAKNLSDATLLSDILRVNSEITKAPLSASMIKRYDEHHQDLTLLKALVRQQLPEKYKEIFFDQSKNGYAGYIDGGASQEEFYKFIKPILEKMDGTEELLAKLNREDLLRKQRTFDNGSIPYQIHLGELHAILRRQEDFYPFLKDNREKIEKILTFRIPYYVGPLARGNSRFAWMTRKSEETITPWNFEEVVDKGASAQSFIERMTNFDKNLPNEKVLPKHSLLYEYFTVYNELTKVKYVTEGMRKPAFLSGEQKKAIVDLLFKTNRKVTVKQLKEDYFKKIECFDSVEISGVEDRFNASLGTYHDLLKIIKDKDFLDNEENEDILEDIVLTLTLFEDREMIEERLKTYAHLFDDKVMKQLKRRRYTGWGRLSRKLINGIRDKQSGKTILDFLKSDGFANRNFMQLIHDDSLTFKEDIQKAQVSGQGDSLHEHIANLAGSPAIKKGILQTVKVVDELVKVMGRHKPENIVIEMARENQTTQKGQKNSRERMKRIEEGIKELGSDILKEYPVENTQLQNEKLYLYYLQNGRDMYVDQELDINRLSDYDVDHIVPQSFLKDDSIDNKVLTRSDKNRGKSDNVPSEEVVKKMKNYWRQLLNAKLITQRKFDNLTKAERGGLSELDKVGFIKRQLVETRQITKHVAQILDSRMNTKYDENDKLIREVRVITLKSKLVSDFRKDFQFYKVREINNYHHAHDAYLNAVVGTALIKKYPKLESEFVYGDYKVYDVRKMIAKSEQEIGKATAKYFFYSNIMNFFKTEITLANGEIRKRPLIETNGETGEIVWDKGRDFATVRKVLSMPQVNIVKKTEVQTGGFSKESILPKRNSDKLIARKKDWDPKKYGGFDSPTVAYSVLVVAKVEKGKSKKLKSVKELLGITIMERSSFEKDPIDFLEAKGYKEVRKDLIIKLPKYSLFELENGRKRMLASAGELQKGNELALPSKYVNFLYLASHYEKLKGSPEDNEQKQLFVEQHKHYLDEIIEQISEFSKRVILADANLDKVLSAYNKHRDKPIREQAENIIHLFTLTNLGAPAAFKYFDTTIDRKRYTSTKEVLDATLIHQSITGLYETRIDLSQLGGD

SEQ ID NO: 837 - protein, 1082 aa, Neisseria meningitidis
MAAFKPNPINYILGLDIGIASVGWAMVEIDEEENPIRLIDLGVRVFERAEVPKTGDSLAMARRLARSVRRLTRRRAHRLLRARRLLKREGVLQAADFDENGLIKSLPNTPWQLRAAALDRKLTPLEWSAVLLHLIKHRGYLSQRKNEGETADKELGALLKGVANNAHALQTGDFRTPAELALNKFEKESGHIRNQRGDYSHTFSRKDLQAELILLFEKQKEFGNPHVSGGLKEGIETLLMTQRPALSGDAVQKMLGHCTFEPAEPKAAKNTYTAERFIWLTKLNNLRILEQGSERPLTDTERATLMDEPYRKSKLTYAQARKLLGLEDTAFFKGLRYGKDNAEASTLMEMKAYHAISRALEKEGLKDKKSPLNLSSELQDEIGTAFSLFKTDEDITGRLKDRVQPEILEALLKHISFDKFVQISLKALRRIVPLMEQGKRYDEACAEIYGDHYGKKNTEEKIYLPPIPADEIRNPVVLRALSQARKVINGVVRRYGSPARIHIETAREVGKSFKDRKEIEKRQEENRKDREKAAAKFREYFPNFVGEPKSKDILKLRLYEQQHGKCLYSGKEINLVRLNEKGYVEIDHALPFSRTWDDSFNNKVLVLGSENQNKGNQTPYEYFNGKDNSREWQEFKARVETSRFPRSKKQRILLQKFDEDGFKECNLNDTRYVNRFLCQFVADHILLTGKGKRRVFASNGQITNLLRGFWGLRKVRAENDRHHALDAVVVACSTVAMQQKITRFVRYKEMNAFDGKTIDKETGKVLHQKTHFPQPWEFFAQEVMIRVFGKPDGKPEFEEADTPEKLRTLLAEKLSSRPEAVHEYVTPLFVSRAPNRKMSGAHKDTLRSAKRFVKHNEKISVKRVWLTEIKLADLENMVNYKNGREIELYEALKARLEAYGGNAKQAFDPKDNPFYKKGGQLVKAVRVEKTQESGVLLNKKNAYTIADNGDMVRVDVFCKVDKKGKNQYFIVPIYAWQVAENILPDIDCKGYRIDDSYTFCFSLHKYDLIAFQKDEKSKVEFAYYINCDSSNGRFYLAWHDKGSKEQQFRISTQNLVLIQKYQVNELGKEIRPCRLKKRPPVR

SEQ ID NO: 838 - protein, 1070 aa, Bacillus sp.
MRELDYRIGLDIGTNSIGWGIIELSWNKDREQYEKARIVDKGVRMFDKAEIPKTGASLAEPRRIARSSRRRLNRKSQRKKDIRNLLVQHEIISQKELASLYPLTKSSMDIWDIRLDGLDRLLDRFEWTRLLIHLAQRRGFKSNRKSELKDVETGKVLSSIQANEKRLSLYRTVGEMWMKNEDFSKYDKRRNSSNEYVFSVSRADLEKEIVTLFEAQRKFQSSYASADLQKTYLQIWAHQLPFASGNAIVNKVGYCSLLKGKEKRVPKATYTFQYFSTLDQINRTRLGPNFQPFTKEQRDVILDEMFNRTDYYKKKTIPEVTYYDIRKWLALDETIQFKGLTYDPNEELKKIELKSFINLKPFYEIKKVVTNYAKKTNEAFSTLDYDTFAYALTVYKTDKDIRSYLKKSNNLSKCCYDDQLIEELLTLSYTKFGHLSFKAINHVLPIMQEGRTYQEAIHQLGYDATNLKKENRSMFLPLFPDEITNPIVKRALTQARKVVNAIIRRYGSPNSVHIELARELSKSHDERTKIMKAHDENYKKNKGAISILIENGILNPTGYDIVRYKLWKEQGERCAYSLKQIPANTFFNEMKKERSGSPVLEIDHILPYSQSFIDSYHNKVLVYGDENQKKGNRIPYTYFLEGNKDWESFESYVRLNSFFSKKKRGYLLKKAYLPRESNMIKERHLNDTRYASSYLKNFIEKNLKFKEVEGSTRKKHVQTVNGIITAHLRKRWGLEKDRQETYLHHAMDAIIVACTDHHMVTKVTEYYQIKESNKSIRKPYFPLPWVGFREEILSHLARQPIARKISEELKIGYQSFDYILVSRMPKRSVTGAAHEQTIMKKGGIDKKGKTIIIKRVYLKDIKFDENGDFKMVGKEQDLATYEAIKQRYIEYGKESKKAFETPLYKPSKKGKGNLIKKIKVEVQTKSFVREVNGGVAQNGDLVRVDLFEKDNRYYMIPIYVMDTVHSELPNKAVTSSKGYEQWLTIDNSFTFKFSLYPYDLVRLVKGNEDRFLYFSTLDINSDRLNFKDVNKPSKQAENRYSLKTIENLEKYEVGVLGDLRFVRQEIRKNF

SEQ ID NO: 839 - RNA, 19 nt, Bacillus sp.
  source 1..19: mol_type = genomic RNA
gtcatagttccattattgc

SEQ ID NO: 840 - RNA, 84 nt, Bacillus sp.
  source 1..84: mol_type = genomic RNA
gctttgatgtttctatgataagggcttaggcccgtggcgttggggatcgcctgcccattttaatgggcttctccccatctattt

SEQ ID NO: 841 - protein, 1071 aa, Bacillus sp.
MRELDYRIGLDIGTNSIGWGVIELSWNKDREQYEKTRIVDKGVRMFDKAEIPKTGASLAEPRRIARSSRRRLNRKSQRKKDIRNLLVQHEIISQKELTSLYPLSKSSMDIWDIRLDGLDRLLDRFEWARLLIHLAQRRGFKSNRKSELKDVETGKVLSSIQVNEKRLSLYRTVGEMWMKNADCSKYGKRRNSPNEYVFSVSRADLEKEIVTLFEAQRKFHSSYASVDLQKTYIQIWAHQLPFASGNAIVNKVGYCSLLKGKEKRVPKATYTFQYFNTLDQINRTRLGPNFQPFTKEQRDIILDKMFQRTDYYKKKTIPEVTYYDIRKWLALDETIQFKGLTYDPNEELKKIEMKPFINLKPFYEIKKVVTNYAKKTNEVFSALDYDTVAYALTVYKTDKDIRSYLKRSNNLSKRCYDDQLIEELLTLSYTKFGHLSFKAINHVLPIMQEGRTYQEAIHQLGYDTTNLKKENRSMFLPIIPDEITNPIVKRALTQARKVVNAIIRRYGSPNSVHIELARELSKSHDERKKIMTAHDENYKKNKGAVSILIDNGILNPTGYDIVRYKLWKEQGERCAYSLKKIPANTFFNELKKERSGPPVLEVDHILPYSQSFIDSYHNKVLVYGDENQKKGNRIPYTFFSEEDKEWESFESYVRSNSFFSKKKRGYLLKKAYLPRESNLIKERHLNDTRYASSYLKNFIEKNLKFKEAVGITRKKYVQTVNGVITAHLRKRWGLEKDRQETYLHHAMDAIIVACTDHHMVTKVTEYYQIKEGNKSIKKPYFPLPWMGFREEILSHLESQPIARKISEELKIGYQSPDYILVSRMPKRSVTGSAHDQTVMKKGDIDKKGKTIIIKRVHLKDIKFDENGDFKMVGKEQDLATYEAIKQRYLEYRKESKKAFETPLYKPSKKGKGNLIKKIKVEVQTKSFVREINGGVAQNGDLVRVDLFEKDNRYYMVPIYVVDTVRSELPNKAVTSSKGYEQWLSIDNSFTFKFSLYPYDLVRLVKGDEDRFLYFSTLDINSDRLNFKDVNKPSKQAEYRYSLKTIENLEKYEIGVLGDLRLVRQETRKIFK

SEQ ID NO: 842 - RNA, 27 nt, Bacillus sp.
  source 1..27: mol_type = genomic RNA
gtcatagttccattaaagccattgctg

SEQ ID NO: 843 - RNA, 93 nt, Bacillus sp.
  source 1..93: mol_type = genomic RNA
acagcaatggctttgatgtttctatgataagggcttcggcccgtggcgttggggatcgcctgcccattttaatgggcttctccccatctattt

SEQ ID NO: 844 - protein, 1072 aa, Bacillus sp.
MSELDYRIGLDIGTNSIGWGVIELFWNKDRERYEKVRIVDKGVRMFDKAEIPNKGASLAEPRRIARSSRRRLNRKSQRKKEIRNLLVQHGMITQEELDLLYPLSKKSIDIWDIRLDGLDRLLNHLEWARLLIHLAQRRGFKSNRKSELKDAETGKVLSSIQVNEKRLFLYRTVGEMWIKDAEFSKYDRRRNSPNEYVFSVSRADLEKEIVTLFEAQRKFQSSYASKNLQETYLQIWAHQLPFASGNAILNKVGYCSLLKGKERRIPKATYTFQYFSALDQVNRTRLGPDFQPFTQEQKEIILDKMFQRTDYYKKKTIPEVSYYDIRKWLELDETIQFKGLNYDPNEELKKIEKKPFINLKAFYEIKKVVANYAERTNEAFSTLDYDAIAYALTVYKTDKDIRSYLKKSNNLSKRCYDDQLIEELFTLSYTKFGHLSFKAINHVLPIMQEGRTYQEAIHQLGYDTTNLKKENRSMFLPLIPDEITNPIVKRAITQARKVVNAIIRRYGSPNSVHIELARELSKSHDERKKIMTAHDENYKKNKGAISILIENGILNPTGYDIVRYKLWKEQGERCAYSLKEIPPDTFFNELKKERNGSPILEVDHILPYSQSFIDSYHNKVLVYSDENRNKGNRIPYTYFLETNKDWEAFERYVRSNKLFSKKKREYLLKKTYLPRESELIKERHLNDTRYASTFLKNFIEQNLQFKEVEVNLRKKRVQTVNGVITAHLRKRWGLEKNRQETYLHHAMDAIIVACTDHHMVTRITEYYQIKESNKSVKKPYFPMPWEGFRDELLSHLASQPIAKKISEELKAGYQSSDYIFVSRMPKRSVTGAAHDQTIRRKGGIDKKGKTIIIKRVRLKDIKFDENGDFKMVGKEQDLATYEAIKQRYLEHRKNSKKAFETPLYKPSKKGTGNLIKRVKIEGQTKAFVREVNGGVAQNSDLVRVDLFEKDDKYYMVPIYVPDTVCSELPKKVVKSGKGYEQWLTLDNSFTFKSSLYPYDLVRLVKGNEDRFLYFGTLDIDSDRLNFKDVNKPSKQNEYRYSLKTIENLEKYEVGVLGDLRLVKQETRRIFNR

SEQ ID NO: 845 - RNA, 21 nt, Bacillus sp.
  source 1..21: mol_type = genomic RNA
gtcatagttccatgaaagcca

SEQ ID NO: 846 - RNA, 85 nt, Bacillus sp.
  source 1..85: mol_type = genomic RNA
tggctttgatgtttctatgataagggtttcggcccgtggcgtcggggatcgcctgcccattccgatgggcttctccccatttatt

SEQ ID NO: 847 - protein, 1337 aa, Enterococcus sp.
MKKDYVIGLDIGTNSVGWAVMTEDYQLVKKKMPIYGNTEKKKIKKNFWGVRLFEEGHTAEDRRLKRTARRRISRRRNRLRYLQAFFEEAMTALDENFFARLQESFLVPEDKKWHRHPIFAKLEDEVAYHETYPTIYHLRKKLADSSEQADLRLIYLALAHIVKYRGHFLIEGKLSTENISVKEQFQQFMIIYNQTFVNGESRLVSAPLPESVLIEEELTEKASRTKKSEKVLQQFPQEKANGLFGQFLKLMVGNKADFKKVFGLEEEAKITYASESYEEDLEGILAKVGDEYSDVFLAAKNVYDAVELSTILADSDKKSHAKLSSSMIVRFTEHQEDLKKFKRFIRENCPDEYDNLFKNEQKDGYAGYIAHAGKVSQLKFYQYVKKIIQDIAGAEYFLEKIAQENFLRKQRTFDNGVIPHQIHLAELQAIIHRQAAYYPFLKENQEKIEQLVTFRIPYYVGPLSKGDASTFAWLKRQSEEPIRPWNLQETVDLDQSATAFIERMTNFDTYLPSEKVLPKHSLLYEKFMVFNELTKISYTDDRGIKANFSGKEKEKIFDYLFKTRRKVKKKDIIQFYRNEYNTEIVTLSGLEEDQFNASFSTYQDLLKCGLTRAELDHPDNAEKLEDIIKILTIFEDRQRIRTQLSTFKGQFSAEVLKKLERKHYTGWGRLSKKLINGIYDKESGKTILDYLIKDDGVSKHYNRNFMQLINDSQLSFKNAIQKAQSSEHEETLSETVNELAGSPAIKKGIYQSLKIVDELVAIMGYAPKRIVVEMARENQTTSTGKRRSIQRLKIVEKAMAEIGSNLLKEQPTTNEQLRDTRLFLYYMQNGKDMYTGDELSLHRLSHYDIDHIIPQSFMKDDSLDNLVLVGSTENRGKSDDVPSKEVVKDMKAYWEKLYAAGLISQRKFQRLTKGEQGGLTLEDKAHFIQRQLVETRQITKNVAGILDQRYNANSKEKKVQIITLKASLTSQFRSIFGLYKVREVNDYHHGQDAYLNCVVATTLLKVYPNLAPEFVYGEYPKFQAFKENKATAKTIIYTNLMRFFTEDEPRFMKDGEILWSNSYLKNIKKELNYHQMNIVKKVEVQKGGFSKESIKPKGPSNKLIPVKNGLDPQKYGGFDSPVVAYTVLFTHEKGKKPLIKQEILGITIMEKTRFEQNPILFLEEKGFLRPRVLMKLPKYTLYEFPEGRRRLLASAKEAQKGNQMVLPEHLLTLLYHAKQCLLPNQSESLAYVEQHQPEFQEILERVVDFAEVHTLAKSKVQQIVKLFEANQTADVKEIAASFIQLMQFNAMGAPSTFKFFQKDIERARYTSIKEIFDATIIYQSTTGLYETRRKVVD

SEQ ID NO: 848 - RNA, 16 nt, Enterococcus sp.
  source 1..16: mol_type = genomic RNA
gttttagagtcatgtt

SEQ ID NO: 849 - RNA, 74 nt, Enterococcus sp.
  source 1..74: mol_type = genomic RNA
aacatagcaagttaaaataaggttttaaccgtaatcaactgtaaagtggcgctgtttcggcgctttttttgttt

SEQ ID NO: 850 - protein, 1456 aa, Empedobacter sp.
MMIKNILGLDLGTNSIGWALIKQDFENKHGEILGMGSRIIPMSQDILGDFGKGNSISQTADRTKYRSVRRLRERFLLRRERLHRVLHLLNFLPQHYASQIDFEKKFGKFKSETEPKLAWENWGGKFSFLFQNSFNEMLEDFKAAGQGLKIPYDWTIYYLRKKALSQKIEKEELAWILLNFNQKRGYYQLRGEEEEENPNKLVEFYSLKIVDVVADEPQKGKSDIWYSLILENGWVYRRASKIPLFDWKDKTRDFIVTTDLNDDRSVKTDKEGNEKRSFRAPSENDWTLVKKKTEQEIDQSHKTVGTYIYETLLLNPKQKIKGKLVRTIERKFYKDELKQILEKQKEFHQELKNDDLYNDCIRELYRNNEAHQLTLSKKDFVHLLMDDLIFYQRPLRSQKSSISNCTLEFRKYKDENGIEHTQYLKAIPKSNPYYQEFRLWQWMYNLNIYRKDDEANVTKEFLNTNKDFESLFEFLNNRKEIEQKPLIKFLLEQKDINKKLLNAEAEKYRWNYVEDKKYPCNETKTMISSRLDKVENISDDFLTRDIEQKIWHIIYSVNDKIEYEKALKSFATRNDLDENSFIEAFKKFSPFKSEYGSFSEKAIKKLLPLMRLGKYWYEDEIVKHSDIYFKNIENLLGDFSNRDKKISEEDKEKWNKSINLKLQEELKDFQTAEIDLFQGLRLHIAQYLVYGRHSEASMIGKWNSAEDLEEFLKDFKQHSLRNPIVEQVITETLRVVKDIWLKYGNGAKDFFNEIHIELGREMKLPADDRKKLTNQISENENTNFRIKALLAEMMNDSSVENVRPFSPMQQEILKIYEDDVLKSDIEIEDDILKISKTAQPSPSDLKRYKLWLEQKYKSPYTGQIIPLNKLFTPEYEIEHIIPQSRYFDDSFSNKVICESAVNKLKDNYIGLEFIKQFGGTIIELGFGKSIKVFETKEYEDFVKKHYANNQGKRNKLLMEDIPEKMIERQMNDTRYISKYISGVLSNIVRVEDGSDEGVNSKNIVPGNGKITTQLKQDWGLNDVWNDLILPRFERMNQLTNSKVFTAWNENYQKFLPTVPIEYSKGFSKKRIDHRHHALDALVIACATKDHVNLLNNQSAKSDTKRYDLKKKSMKFEKVVYNDAKTGEKIEREVPKQFLKPWENFTLDVKHNLETIIVSFKQNLRVINKATNYYEKYVEKDGTKNKERVEQTGTNWAIRKPMHKDTVSGKVDLPWVKVPKGKILTATRKSLDSSFDLKSIGSITDTGIQKILKNYLAFKDGNPELAFSPEGIDDLNKNIEKYNDGKPHQPINKVRVFELGSKFQVGQSGNKKDKYVEAAKGTNLFFAVYEDEKGKRNYETIPLNEVIERQKQGLSVVDLKGTNDFYLCPNDFVYIPSGDELENINNVDFKDIKKEINERIYKVVSFTGNRLSCIPYMVATTIVNKLEFTQLNKIEFTKEKEICIKLNVDRLGNISKA

SEQ ID NO: 851 - RNA, 18 nt, Empedobacter sp.
  source 1..18: mol_type = genomic RNA
gttgtgaattgctttcaa

SEQ ID NO: 852 - RNA, 75 nt, Empedobacter sp.
  source 1..75: mol_type = genomic RNA
ttgaaaagcaattcacaataaggattattccgttgtgaaaacattcaaggcggggcaactcgtcttttttctttt

SEQ ID NO: 853 - protein, 1090 aa, Rhizobium sp.
MNNLLYSFDIGTNSIGWCVFALDEVGDPCRIVDLGARIYADGRDPQTKTSLAVARREARAMSRRRDRSLRRRKATLRTMIEYGLMPAHKVEQETLLRKTGDREGGDEGFNPYALRARALGEKLPPFYIGRALFHLGQRRGFKSNRKTDRKDNDKGKIALGIDELRAAMHRSGSPTLGAWLAMRRADGHPVRLRAGSEVFDAEGYAFYPERSLLEDEFRQIWTAQAVHHPQLLTSERRAHLFRVMFYQRPLKKPLVGRCSFNPAEARLSRAHPLFQEFRLYKEVNDLEVVLPDQSHRKLTLDERNALVAKLKSSRKASFSVLRRTLKLTPDLAFNKESEARKDLLGDEINSALADAKMFGVRWGGFPRARQWEIITHLKEEENPARLSDWLKSEFGLDDERVVAIANIALPEGYGRLGETALASMLEEMKTAVIPESEAAKRCGYDHSNLAKEQDEGLDILPEYQEILERHIPPGTGDPDDIYDIRKGRITNPTVHIGLNQLRRVVNALIKRHGKPRHIVVELARDLQLSEKQKADVNRRIAKNTREAEGRSQKLIEMGQLDTGYNRLLLKLWEELNQDKPEDRVCIYSGKPIGIAMLFSGEVDIDHILPWSKTLDDSQANKLLCLKSANRQKRNRTPSDVPEWRDCYEEVLARAARLPKNKRWRFAADAMQQFEAEGGFLARQLTDTQYLSRMAFEYLSALFPSEEADKWGELRQRKRVHVVPGRLTELLRRNWGLNTLLPDHNLGEMAQEKNRKDHRHHAIDAAVIGVTSRSLLQRMSGAAARLDDVAFDDLVRTVVKDNPPWPGFREELLGCINRVTVSHKPDHGTVSRAAYAQGKGQTAGKLHNDTAYGITGLQDMKGSPLVVRRKPFMALEVKDIASIRDTELQSALYDAIGSLTEKKALQEALVRFRDRHPQFKGIRRVRVLEALSVIPIVDNNGKAYKGYKGDANYRYEVWETLDGRWHTEVVSMFDAHQPGWQSPFHRQHPAARRVLKLQQNDMVAYEHPADGYTIARVVKFSNDKRIYFASHRESGSLKARDADKGDPFTYFAKANNGLRDIKCRQVRIDAAGRVFDPGPQDREARQSKGRA

SEQ ID NO: 854 - RNA, 31 nt, Rhizobium sp.
  source 1..31: mol_type = genomic RNA
ggttgcggctggaccgcgttttctgatctgc

SEQ ID NO: 855 - RNA, 79 nt, Rhizobium sp.
  source 1..79: mol_type = genomic RNA
gcaaatcagaaaacgcggtctggccgttaacaagcctcgaccagcaccagataaggcggtccctccgggggccgttttt

SEQ ID NO: 856 - protein, 1071 aa, Bacillus sp.
MRELDYRIGLDIGTNSIGWGVIELSWNKDREQYEKTRIVDKGVRMFDKAEIPKTGASLAEPRRIARSSRRRLNRKSQRKKDIRNLLVQHEIISQKELTSLYPLSKSSMDIWDIRLDGLDRLLDRFEWARLLIHLAQRRGFKSNRKSELKDVETGKVLSSIQVNEKRLSLYRTVGEMWMKNADCSKYGKRRNSPNEYVFSVSRADLEKEIVTLFEAQRKFHSSYASVDLQKTYIQIWAHQLPFASGNAIVNKVGYCSLLKGKEKRVPKATYTFQYFNTLDQINRTRLGPNFQPFTKEQRDIILDKMFQRTDYYKKKTIPEVTYYDIRKWLALDETIQFKGLTYDPNEELKKIEMKPFINLKPFYEIKKVVTNYAKKTNEVFSALDYDTVAYALTVYKTDKDIRSYLKRSNNLSKRCYDDQLIEELLTLSYTKFGHLSFKAINHVLPIMQEGRTYQEAIHQLGYDTTNLKKENRSMFLPIIPDEITNPIVKRALTQARKVVNAIIRRYGSPNSVHIELARELSKSHDERKKIMTAHDENYKKNKGAISILIENGILNPTGYDIVRYKLWKEQGERCAYSLKKIPANTFFNELKKERSGPPVLEVDHILPYSQSFIDSYHNKVLVYGDENQKKGNRIPYTFFSEEDKEWESFESYVRSNSFFSKKKRGYLLKKAYLPRESNLIKERHLNDTRYASSYLKNFIEKNLKFKEAVGITRKKYVQTVNGVITAHLRKRWGLEKDRQETYLHHAMDAIIVACTDHHMVTKVTEYYQIKEGNKSIKKPYFPLPWMGFREEILSHLESQPIARKISEELKIGYQSSDYILVSRMPKRSVTGSAHDQTVMKKGGIDKKGKTIIIKRVHLKDIKFDENGDFKMVGKEQDLATYEAIKQRYLEYRKKSKKAFETPLYKPSKKGKGNLIKKIKVEVQTKSFVREINGGVAQNGDLVRVDLFEKDNRYYMVPIYVVDTVRSELPNKAVTSSKGYEQWLSIDNSFTFKFSLYPYDLVRLVKGDEDRFLYFSTLDINSDRLNFKDVNKPSKQAEYRYSLKTIENLEKYEIGVLGDLRLVRQETRKIFK

SEQ ID NO: 857 - RNA, 34 nt, Bacillus sp.
  source 1..34: mol_type = genomic RNA
gtcatagttccattaaagccattgctgttttatg

SEQ ID NO: 858 - RNA, 148 nt, Bacillus sp.
  source 1..148: mol_type = genomic RNA
catgatacagcaatggctttgatgtttctatgataagggcttcggcccgtggcgttggggatcgcctgcccattttaatgggcttctccccatctatttaatgagaaatttacaaccttggctattcttaaatagctaaggttttttt

SEQ ID NO: 859 - protein, 1054 aa, Staphylococcus sp.
MKEKYILGLDLGITSVGYGIINFETKKIIDAGVRLFPEANVDNNEGRRSKRGSRRLKRRRIHRLERVKLLLTEYDLINKEQIPTSNNPYQIRVKGLSEILSKDELAIALLHLAKRRGIHNINVSSEDEDASNELSTKEQINRNNKLLKDKYVCEVQLQRLKEGQIRGEKNRFKTTDILKEIDQLLKVQKDYHNLDIDFINQYKEIVETRREYFEGPGQGSPFGWNGDLKKWYEMLMGHCTYFPQELRSVKYAYSADLFNALNDLNNLIIQRDNSEKLEYHEKYHIIENVFKQKKKPTLKQIAKEIGVNPEDIKGYRITKSGTPQFTEFKLYHDLKSIVFDKSILENEAILDQIAEILTIYQDEQSIKEELNKLPEILNEQDKAEIAKLIGYNGTHRLSLKCIHLINEELWQTSRNQMEIFNYLNIKPNKVDLSEQNKIPKDMVNDFILSPVVKRTFIQSINVINKVIEKYGIPEDIIIELARENNSDDRKKFINNLQKKNEATRKRINEIIGQTGNQNAKRIVEKIRLHDQQEGKCLYSLESIALMDLLNNPQNYEVDHIIPRSVAFDNSIHNKVLVKQIENSKKGNRTPYQYLNSSDAKLSYNQFKQHILNLSKSKDRISKKKKDYLLEERDINKFEVQKEFINRNLVDTRYATRELTSYLKAYFSANNMDVKVKTINGSFTNHLRKVWRFDKYRNHGYKHHAEDALIIANADFLFKENKKLQNANKILEKPTIENNTKKVTVEKEEDYNNVFETPKLVEDIKQYRDYKFSHRVDKKPNRQLINDTLYSTRMKDEHDYIVQTITDIYGKDNTNLKKQFNKNPEKFLMYQNDPKTFEKLSIIMKQYSDEKNPLAKYYEETGEYLTKYSKKNNGPIVKKIKLLGNKVGNHLDVTNKYENSTKKLVKLSIKNYRFDVYLTEKGYKFVTIAYLNVFKKDNYYYIPKDKYQELKEKKKIKDTDQFIASFYKNDLIKLNGDLYKIIGVNSDDRNIIELDYYDIKYKDYCEINNIKGEPRIKKTIGKKTESIEKFTTDVLGNLYLHSTEKAPQLIFKRGL

SEQ ID NO: 860 - RNA, 28 nt, Staphylococcus sp.
  source 1..28: mol_type = genomic RNA
gttttagtactctgtaattttaggtatg

SEQ ID NO: 861 - RNA, 85 nt, Staphylococcus sp.
  source 1..85: mol_type = genomic RNA
tcatacctaaaattacagaatctactgaaacaagactatatgtcgtgtttatcccactaatttattagtgggatttttttgtttt

SEQ ID NO: 862 - protein, 1076 aa, Bacillus sp.
MSELDYRIGLDIGTNSIGWGVIELFWNKDRERYEKVRIVDKGVRMFDKAEIPKTGASLAEPRRIARSSRRRLNRKSQRKKEIRNLLVQHGVITQEELDLLYPLSKKSMDIWDIRLDGLDRLLNHLEWTRLLIHLAQRRGFKSNRKSELKDAETGKVLSSIQVNEKRLSLYRTVGEMWIKDAEFSKYDRRRNSPNEYVFSVSRADLEKEIVTLFEAQRKFQSSYSSKNLQETYLQIWAHQLPFASGNAILNKVGYCSLLKGKERRIPKATYTFQYFSALDQVNRTRLGPDFQPFTQEQKEIILDKMFQRTDYYKKKTIPEVSYYDIRKWLELDETIQFKGLNYDPNEELKKIEKKPFINLKAFYEIKKVVANYAERTNEAFSTLDYDAIAYALTVYKTDKDIRSYLKKSNNLSKRCYDDQLIEELFTLSYTKFGHLSFKAINRVLPIMQEGRTYQEAIQQLGYDTTNLKKENRSMFLPLIPDEITNPIVKRALTQARKVVNAIIRRYGSPNSVHIELARELSKSHDERKKIMTAHDENYKKNKGAISILIENGILNPTGYDIVRYKLWKEQGERCAYSLKEIPPDTFFNELKKERNGSSILEVDHILPYSQSFIDSYHNKVLVYSDENRNKGNRIPYTYFLETNKDWEAFERYVRSNKLFSKKKREYLLKKAYLPRESELIKERHLNDTRYASTFLKNFIEQNLQFKEVEVNLRKKRVQTVNGVITAHLRKRWGLEKNRQETYLHHAMDAIIVACTDHHMVTRITEYYQIKESNKSVKKPYFPMPWEGFRDELLSHLASQPIAKKISEELKAGYQSSDYIFVSRMPKRSVTGAAHNQMIRRKGGIDKKGKTIIIKRVRLKDIKFDENGDFKMVGKEQDLATYEAIKQRYLDHGKNLKKAFETPLYKPSKKGTGNLIKRVKIEGQTKAFVREVNGGVAQNSDLVRVDLFEKDDKYYMVPIYVPDTVCSELPKKVVKSGKGYEQWLTLDNSFTFKFSLYPYDLVRLVKGDEDRFLYFGTLDIDSDRLNFKDVNKPSKQNEYRYSLKTIEDLEKYEVGVLGDLRLVRKETRRNFHEIKIN

SEQ ID NO: 863 - RNA, 20 nt, Bacillus sp.
  source 1..20: mol_type = genomic RNA
gtcatagttccattaaagcc

SEQ ID NO: 864 - RNA, 84 nt, Bacillus sp.
  source 1..84: mol_type = genomic RNA
ggctttgatgtttctatgataagggtttcggcccgtggcgtcggggatcgcctgcccattccgatgggcttctccccatttatt

SEQ ID NO: 865 - protein, 1071 aa, Bacillus sp.
MRELDYRIGLDIGTNSIGWGVIELSWNKDREQYEKTRIVDKGVRMFDKAEIPKTGASLAEPRRIARSSRRRLNRKSQRKKDIRNLLVQHEIISQKELTSLYPLSKSSMDIWDIRLDGLDRLLDRFEWARLLIHLAQRRGFKSNRKSELKDVETGKVLSSIQVNEKRLSLYRTVGEMWMKNADFSKYGKRRNSPNEYVFSVSRADLEKEIVTLFEAQRKFHSSYASVDLQKTYIQIWAHQLPFASGNAIVNKVGYCSLLKGKEKRVPKATYTFQYFNTLDQINRTRLGPNFQPFTKEQRDIILDKMFQRTDYYKKKTIPEVTYYDIRKWLALDETIQFKGLTYDPNEELKKIEMKPFINLKPFYEIKKVVTNYAKKTNEVFSALDYDTVAYALTVYKTDKDIRSYLKRSNNLSKRCYDDQLIEELLTLSYTKFGHLSFKAINHVLPIMQEGRTYQEAIHQLGYDTTNLKKENRSMFLPIIPDEITNPIVKRALTQARKVVNAIIRRYGSPNSVHIELARELSKSHDERKKIMTAHDENYKKNKGAISILIENGILNPTGYDIVRYKLWKEQGERCAYSLKKISANTFFNELKKERSGPPVLEVDHILPYSQSFIDSYHNKVLVYGDENQKKGNRIPYTFFSEEDKEWESFESYVRSNSFFSKKKRGYLLKKAYLPRESNLIKERHLNDTRYASSYLKNFIEKNLKFKEAVGITRKKYVQTVNGVITAHLRKRWGLEKDRQETYLHHAMDAIIVACTDHHMVTKVTEYYQIKEGNKSIKKPYFPLPWMGFREEILSHLESQPIARKISEELKIGYQSSDYILVSRMPKRSVTGSAHDQTVMKKGGIDKKGKTIIIKRVHLKDIKFDENGDFKMVGKEQDLATYEAIKQRYLEYRKESKKAFETPLYKPSKKGKGNLIKKIKVEVQTKSFVREINGGVAQNGDLVRVDLFEKDNRYYMVPIYVVDTVRSELPNKAVTSSKGYEQWLSIDNSFTFKFSLYPYDLVRLVKGDEDRFLYFSTLDINSDRLNFKDVNKPSKQAEYRYSLKTIENLEKYEIGVLGDLRLVRQETRKIFK

SEQ ID NO: 866 - RNA, 24 nt, Bacillus sp.
  source 1..24: mol_type = genomic RNA
gtcatagttccattaaagccattg

SEQ ID NO: 867 - RNA, 138 nt, Bacillus sp.
  source 1..138: mol_type = genomic RNA
caatggctttgatgtttctatgataagggcttcggcccgtggcgttggggatcgcctgcccattttaatgggcttctccccatctatttaatgagaattttacaaccttggctattcttaaatagctaaggttttttt

SEQ ID NO: 868 - protein, 1091 aa, Rhizobium sp.
MDIETLFAFDIGTNSIGFCVFALDENGEPYRIIDIGTRIYADGRDPQSKASLAVARREARAMSRRRDRYVNRRKAVLRTLTEYGLMPAEASARQALIAETSDRNGAAGEASANPYALRAMALDEKLPLYWIGRVLFHLNQRRGFKSNRKTDRKDNEKGVIALGIGELRAAMHKTKARTYGEWLAARREDGHVTRLRAGSDAFEGDGYAFYPERSLLEAEFREIWARQSSFYPDVLTEARGDHLFQVMFYQRPLKKPRVGKCAFNPLEERLAKAHPLFQEFRLYKEVNELELVLPDHSHKKLDIEQRNALVILLRANREVTFKKLRTALKLAPDIVFNKESESREKLRGDEVHSVLADKKRFGPQWGALSRERQWQIIQTLKDEENPEKLFGWLKEEFGFEGEKADAIANAPLPEGYGRLGETALSSMLDEMKAAVIPEAEAAKNCGYDHSKLGEDREEGEAFLPPYQEILSRQIPPGTNDPADIYDIRMGRFTNPTVHIGLNQLRRVVNALIARHGKPQFVSLELARDLQLSEKQKAEANRAIAKNTREAAARSKKLGEMGQLDTGYNRLLLKLWEELNPSKPEDRVCIYSGKPIGIDMLFSAEVDVDHILPWSKTLDDSQANKLLCLKSANRQKRNRAPADVPEWRDRYEEILARAARLAPNKRRRFAPNAMAEFEAEGGFLARQLTDTQYLSRMAREYLSCLFPSAEIDRRGERKKKIRVIVSPGRLTEMLRRNWGLNNILPDHNLGEMTQAKNRKDHRHHAIDAAVVGVTTRSLLQRIATAAGRLDEADFENLVRKMVSENPPWPTFREELQAAVNGIVVSHKPDHGTVSRKGYAEGKGRTAGRLHNDTAYGFGTDASGNPVAVRRKLFTSLEAKDIPMIRDPELQAELYAAIDGLDDRRALQDALLSFRRTHPKFKGIRRVRMAETLSFIPIRDSQGNVYKGYKGDANYRYDVWETLDGKWHADVVTMFNAHQPDWRSPVHQEHPTARRVLRLQQNDMVAYEHPNDGYTIARVVKFNTAGIVYFASHRESGSLKARDADKQDPFKYFSKSAAGLKDIQCRQIRIDAAGRVFDPGPQDRASKSTRKTN

SEQ ID NO: 869 - RNA, 29 nt, Rhizobium sp.
  source 1..29: mol_type = genomic RNA
gttgcggctggaccgcgttttctgatctg

SEQ ID NO: 870 - RNA, 78 nt, Rhizobium sp.
  source 1..78: mol_type = genomic RNA
cagatcagaaaacgcggtctggccgttaacaagctagaagcaccaaataaggccgttccttcgggagcggctttttct

SEQ ID NO: 871 - protein, 1401 aa, Myroides sp.
MKRILGIDLGTTSIGWAYVHEAENENEISSIEKLGVRVNPLTVDEQINFEKGKPITTNATRTLFRSARRNLQRFKLRRKHLIEILKHNNWISKQTLLTENGNHTTFETISLRDKAATQKVTLEELARVLLMINKKRGYKSSRKVNNTEEGQLIDGMEVAKKLYHEQLTPGQLSLQLIKQGVKRLPDYYRSDLNHELDLIWAFQQKFYPHILTSEFKELLKGKGLRATSNQFWTNYNFNTADNKGTREEKKLQNYQWRSDALIKQLDKEIVAYVISEINGQINNSSGYLGAISDRSKELYFNQLTVGQYLHRQLIANPHTRLKSQVFYRQDYLDEFEKIWETQSKFYPKELTTVLKNEIRDTVIFYQRKLKSQKGLISFCEFEQEQKIINGKTKTIGHRVIPKSSPLFQEFKIWQQLHNVVLRNKKTNVITPLAEEQKSHLFEELNLKGKLSSTQILKLIEDKPKDWELNYSELEGNNTNKALYNAYLDILDLEGYDIRDELKIKLNKDDIELSDLDVNASEIKEMIFSIFKHLGINTEILEFDATLKDKAFEKQASYQLWHLLYSYEEDNSPTGLDRLHNLLQKKFNFTLDQAKLVGNVLFQDDYGNLSSKAIKNIFPYITDNNYSTACELAGYKHSKHSLTKEENEKRELKSRLTILTKNSLRNPVVEKILNQMINVINTLIESENDKLVAQGKEPNFQFDEIRIELARELKKNAKEREELTKSMTQGKTNHEKIIKILQKEDGIKNPTRNDITRFKLYSELKNNGYKDLYTNEYIERKDIFSKEYDIEHIIPQSKLFDDSFSNKTLVRRNVNLKKGNQTAYDFILSEYGQEKANEFETRITNLYSLGKDEGISKSKYKKLLMQESEIGKGFIERDLRETQYIAKKAKSLLLEITRNVVSTSGGITDRLREDWGLVNVMKELNLKKFRDAGLTEFVEMKDGNKKEVIIDWTKRNDHRHHAMDALTIAFTKHNHIQYLNHLNARKNTKDELHTNIIAIEKKETTIITDERGNKKRIFKEPIPNFRNIAKSHLEAILVSHKAKNKVVTKNINKISGKKIGQQTLTPRGQLHKETVYGKIRQYVSKEEKVGPKFTKEVIELVSNPTYRDLLLKRLQENNNDPKKAFGGKNALSKSPIYINLEKNIIVPEVVKLVWLEDDYTIRKEISPELKIDKVVDEGVKRILQNRLALYNGDAKIAFSDLDNNPIWLSKDKGITIKRVTLSGVKNATALHTKKDHLGQPILDHKGQEIPVDFISTGNNHHVAIYEDKNGKLQESVVSHFEAVERVNQQLPIIDKTFNQHLGWKFLFTMKQNELFLFPSDDFNPNEIDLFDTRNYAVISKHLFRAQKLSTKDYSFRHHLETNVEDIKDLKTITWRREGLNGIQNIVKIRTNHLGEIVHIGEY

SEQ ID NO: 872 - RNA, 21 nt, Myroides sp.
  source 1..21: mol_type = genomic RNA
gttgtgaattgctttcaaaca

SEQ ID NO: 873 - RNA, 105 nt, Myroides sp.
  source 1..105: mol_type = genomic RNA
tgaaagcaattcacaataaggattattccgttgtgaaaacatctagtcctcgactaatttcggggaataaagccttaactctgttaaggctttttttagtttttt

SEQ ID NO: 874 - protein, 1092 aa, Bacillus sp.
MRYSIGLDIGTTSIGNAVINKDLQRFEHLGVRIFDAAENPKDGSSLSAPRRLARSSRRRLRRRKHRVERTKQLLINKGLLTKTQVKNLYNSKNINLDIWDIRVSGIDRKLFNNEFARVLIHFSKNRGFKSNRKSELKEDDNGAILSAVKENRELMDEKGYRTIAEMLVSDEKYEGTKRNKGGDYSHVVARSDIENEICLLFQKQREYGHPFATEENEEAFLSIWSSQRPFSTKDDIVKKIGNCTLEPKEKRAPKSTYTFERFRALDKLNRLRILSTTAPSRPLTNEERKSILSSLFSKKEVKYKELRKLLKLTDDQRFNEIYYSPDETIEKTENRTFLSLESQYKIKKIIEKTESKNMQSSYHPIDYDTIGYALTVFKDDKDIQHYLQNSYIDSKGKAIPNMANREYNLELIEELLGLSFAKFGHLSLKALNNILPYMEEGEPYHIACEMASYQFSQRLSKEKHRLLPPIPVDEIPNPVVVRALTQVRKVLNSIIKKYGPPSDIYIELAREMSKPFKERKSLEREFNENRQINEKAKAHISELYRIPNDPRPHDILKFKLWNEQNGICPYSLKPISIEYLFNIGYAEVDHIIPYSRSFDDSNGNKVLVLTRENQNKLNRTPYEWFGHEENRWEDFVSFIRTMKVGKKKKNMLLKKNFDEEQEEQILSRNLNDTRYITRYIKSFIEDNLEFRTEENKEQYVHTVNGAYTSLMRKRWGLNKDRRGNDLHHAVDAAIIAVSLPFKNKVNAYFKRQETGLSKLLNNKKDIFPEPWRNFIKELEARMIQDPEKMKRALESLELETYGEIFLNKLKPIFVSRMPKHSIKGQIHEETIRRVRGFTEEGFLVTVKKTRLDQIPFDKNGDFPMYGKETDIKTYMAIKQRYLEYGQDKQKAFAVPLRKPSKNPKNAPIVRSVKIEGKANRVVMLDDKAAADNASIVRTEVFRHKKTGEYYLTPVYVADILSNKIPDRLITIKKSYSDWDRITDEHEYLFSLYNNDLVKIILPKEKETKKYTGGNHLWQEGFFYFKGVDSSNAGIKIINHLNSFEARIGTKRLIAFEKYQVNPLGEINKVHGEKRPGELLNKEEIKENRKNIS

SEQ ID NO: 875 - RNA, 23 nt, Bacillus sp.
  source 1..23: mol_type = genomic RNA
gccataattcctctgtaaaactt

SEQ ID NO: 876 - RNA, 112 nt, Bacillus sp.
  source 1..112: mol_type = genomic RNA
aaggtttatagagttattatggtaaggcaatatgccgtggcgttggggatcgcctatgtccggttttaccggatctccctaaaggtgactaactttggttagtcaccttttt

SEQ ID NO: 877 - protein, 1075 aa, Bacillus sp.
MDYRIGLDIGTNSVGWGVIRMQYNDLLERYEKQGIVDAGVRMFDKAEIPKTGASLAAPRREARSSRKRLRRRSQRKKAIRYLIILHELLSEDQLQQLYPLQKESIDIWDIRLESLDRVLNQTEWARLLIHLGQRRGFKSNRKSEYKEEETGKVLVNIQENQKALQQYRTVAEMWMKDAKFSQFDKKRNAPGEYLFSVSRYDLQNEIQTIFESQRNLGSPYATTDLEEEYISVWSKQLPFASGEDILKKVGYCSLERKERRIPKATYTFQYFILLDGLNKIRVGADARQLTTEERSILIEKILTRNDYFSKKSLPDLTYGDLRKWLALDSSLLFKDLTYDPNEKVSKVEKKVFANLKSLYELRKVVETSSNGQSFERIDYDTFGYALTVYKTDEDIRRYLKKPSNLAHKVYEEDLIERLLSLSYEKFGHLSLKAIQTILPYMEDGMMYTEAVQAAGYDITGLQSAKRTLLLPTIPADITNPVVRRALTQTRKVVNAIIKRYGSPLTIHIELARELSKDHQERQQILKNQQANYERNKGAISVLVENGILNPTGYDIVRYKLWKEQGERCAYSLKVIPPSVFFGELKRERNHIPTLEVDHILPYSQSFMDNYHNKVLVYSDENQKKGNRIPSQYLMAVSPEKWTKFEEYVSSNKGFSKQKRQYLLKKDYSSRERDIVKERHLVDTRYATRFMKNFIEKTLLFKESRSSSLTKRVQTVNGKITAHFRKRWGLEKERTETYLHHALDAIVVACTDQHMVTRVTEYYQERERNVRQPYFPWPWEGFRDELLNYLNRQPDSLEISQSIKQNLFLRDYLMVSRMPKHSVTGMSHKQTIRSKACVDEKGKVKTTKRVLLQDIKFDSNGDFKMIGKEQDMATYNAIKERFLSSGGNVKSAFTEPLHKPSKKGKGNVIRKVTVEDQTKSFVRDVNGGVAENGSLVRIDLFEKEGMYYVVPIYVGDTVLKQLPIKISASNRGYYKWVELDENYRFKFSLYAHDLIRIVTKDEDRFFYFSYFDNDGNRIKFLNINSPTGKNENRYGVRSIKLIEKYNVSTLGDISLVKSEERQLFQGMKKKVLNIIN

SEQ ID NO: 878 - RNA, 17 nt, Bacillus sp.
  source 1..17: mol_type = genomic RNA
gtcatagttccattaaa

SEQ ID NO: 879 - RNA, 83 nt, Bacillus sp.
  source 1..83: mol_type = genomic RNA
tttgatgttcctatgataagggccttgagcccgtggcgttggggatcgcctgcccgtttatacgggcttctccctacttactt

SEQ ID NO: 880 - protein, 1404 aa, Chryseobacterium sp.
MKKTLGIDLGTNSIGWVIRNADLLDNQIEDFGVITFEKGVASEKGNEFPKVQKRTESRGKRRNYQSEKYRKFALLAFLIQKNMCPLTMDEFCNWKDYRKGKKREYPQSEEFLNWIRFDFNGDGLPDFHLFGKEKDDSYYVFRAFAADENHKNVFDNNPHILGRVLYQMVQRRGFKGRDEEEAKTMLVGSDKNGTKGRNDIEEYIEKYKTLGAALYYHQKDFGGRIKQRYNLRKDNENELKEICKIHQLSQEDYEKLWKAIIWQRPLRTQKGLVGNCIYEKNKKRVAVSHPLYEEYRTWVFINNLNIIPPFGEEKQNYISEKIYPLFYKSKPDFELSDIDKQLKKDGAKRTSKHNDKTKVLSVKLLKQFQDVFGEDWKQKLQWDINGDRNSQPEKKEKSLYTFEDLWHILLTFDGQENLKKFALEKLNLDDEKAIKFSKIKLQQGYATLSISAIKKILPYLQRGFLYSHAVYMANLYKMLGETTISETLTNHFSDEILKILENDDFNRKNSAIINSLISEMLNDDNRYYIADNRNLDKTEEQIVLKSITDNYGLETWGNFDEEKKMEIIDFVSSKYLEFLKKTYTEKGNLFIQPERIHDKIFNFLKETYHVSEDKIKYLWHPSEQENYAKADEYFEYSIGSKKYYVKEESTQNFLSRNPNAEFDGRQLKLLGNPEPLSKGFKNPMALKSLHKLKNLVNYLLQTGKIDEGTRVVIEIARELNDKNKRKAIENWQKDREKENEAFRKEIEVYKEQFPNINLIDENTLIRKIRLWHEQNKICLYTGKTIPFSELIIGNKYDFEHTIPASISFDNELKNLTISDSSYNRLYKGKKFPTQLSNYDSEQTINGESCNSILRNIEFIFGERIVEYKEIKGKTEKIVKWKKIDELEKQFDEWKKKASYASTKEIKDNCIVKYHTIKMDLDYLKSKLATFTITEYKAGWRNSQIRDTQIITKYALPYFKTLFKRVSVEKGGVTDIFKKVYKVQSRNSKKDRSVHSHHAQDAAILTLIPNAFHRERIIKAYENEIDNRTGKTYHEQPLDWENFSEKYILELQDKVLINNLTDNRTITQTYKTVRKRGKVVYDIDENGNSLKRVSKGDTIRGQLHGETFYGAIKQPVRDEDNKILFDENKKMILKDEIYLAVRKPLVYKKDANSPGFKTLDEVEKVIVDKGLFKMIKKQVEESDFKTALIDGVYMLNESGEKVNKIRRIRCFENGLKYTTAIKVHEHSFVSHKEYKQSTLATNGENTYCLFYKNDKGKAMKILSIVDLAELKLKNIQNLYNEPEFSSFEVGKGKNKYKIPLYSVLKSGDKVLFYKENIYELKDLEQKELSDRMFKMYQFEKDGRIKFRHHLAAGIDTELKKENPENSSVNFEEKQVFLRLSQGQWNFAIDGKDFEISLDGKINWKF

SEQ ID NO: 881 - RNA, 15 nt, Chryseobacterium sp.
  source 1..15: mol_type = genomic RNA
gttgtgaattgcttt

SEQ ID NO: 882 - RNA, 68 nt, Chryseobacterium sp.
  source 1..68: mol_type = genomic RNA
aaagcaattcacaataaggcttaaaagccgaagaaaatctttagtcctgcgtactccgtgggattttt

SEQ ID NO: 883 - protein, 1092 aa, Bacillus sp.
MRYSIGLDIGTTSIGSAVINNDLQRFEHLGVRIFDAAENPKDGSSLSAPRRLARSSRKRLRRRKHRVERTKQILINKGLLTKTQVKNLYNSKNVNLDVWDIRVSGLDRKLFNDEFARVLIHFSKNRGFKSNRKSELKEDDNGAILSAVKENKELMEEKGYRTIAEMLVLDERYEGTKRNKDGDYSHVVSRSDIENEIRLLFQKQREYGHPFAIEENEEAFLAIWSSQRPFATKDDIVKKIGTCTLEPREKRAPKSTYTFERFRALDKLNRLRILSTTTPSRPLTNEERDSILNSLFSKKEVKYKELRKMLKLTDDQRFNEIYYSPDETIEKTENRVFLSSESQYKIKKIIEKTESKNMLSTYCPIDYDTIGYALTVFKDDKDIQHYLQNRYVDSKGKAISNMANREYNLELIEELLGLSFSKFGHLSLKALNNILPYMEEGEPYHIACEMAGYQFSQRLTKEKHRLLPPIPVDEIPNPVVVRALTQVRKVLNSIIKKYGPPSDIYIELAREMGKPFKERKSLEREFNENRQVNEKAKAHISELYRVPNDPRPHDILKFKLWKEQNGICPYSFKPISVDYLFNIGYTEVDHIIPYSRSFDDSNGNKVLVLTNENRNKLNRTPYEWFGHDENRWGDFVSFVRTMKVGKKKKDMLLKKNFDEEQEEQILSRNLNDTRYITRYIKSFIEDNLEFRTEENKKQYVHTVNGGYTSLMRKRWGLNKDRRGNDLHHAVDAAIIAVSLPFKHKVNTYFKRQEIGLSNLSNNKKDIFPEPWRNFIKELEARMIQDPEKMKTALESLELETYGEIFLNKLKPIFVSRMPKHSIKGQIHEETIRRVRGLTEEGFLVTVKKTRLDQIPFDKNGDFPMYGKETDIKTYMAIKQRYLEYGQDKQKAFAIPLRKPSKNPENAPIVRSVKIEGKANRVVMLDDKAAADNASIARTEVFRHKETGEYYVTPVYVADIVSNKIPDRLITLKKPYSEWDRITDEYEYLFSLYNNDLIKIVLPKEKETKKYTGGNHLWQEGFFYFKGVDSSNASIKIIDHLNSFEVRIGIRRLIAFEKYQVNPLGEINKVHGEKRPGELLNEEEIKENRKNIS

SEQ ID NO: 884 - RNA, 23 nt, Bacillus sp.
  source 1..23: mol_type = genomic RNA
gccataattcctctgtaaaactt

SEQ ID NO: 885 - RNA, 112 nt, Bacillus sp.
  source 1..112: mol_type = genomic RNA
aaggtttatagagttattatggtaaggcaatatgccgtggcgttggggatcgcctatgtccggttttaccggatctccctagaggtgactaactttggttagtcgccttttt

SEQ ID NO: 886 - protein, 1488 aa, Weissella sp.
MAKQKYTVGLDIGTNSVGWAVINKDFKLVSGKKHINDNGKQKRSRTNLWGVRLFDAADTAADRRLKRGMRRRIARRKERLNYLRGIFQADILAFDDSFFIRMDESFLQDDDKQATAFSYRDQSGAMQTRVVTEKEAVKYPLFNGKSGSGETYTDESAYYNQYPTIYHLRQRLIDNPAQADLRLVYLAMHHILKYRGHFVNQGQTFDLGNINIAGNLTSALDKLDEASSFKFGLADVDADQANAILKNKQWSASKKAYELNTLYEIIQDTVYRRENETQAVAYDSLTVKQQEKWLAEKQKQVKAFLTGIVGNTISPKDIFANKDYDRKQNEDFPEKIKYSNENFEEQIGELEKYLDETEVAAIVAGKDVYESLVLSNILTKSTLSGSMIEKYNVHGTQLKSLKSFSRKVSAEFYDKLFNVVKDEKGKPQIGVYAQYIDGVGNPAKRLAREDFYDALKKVFESEFKGLTFPAGEKGIDFTKTDLSADRMAFIREMNEAINLENYLPKQRQADNGAIPYQVHEHELIRIIENQKQYYPFLGDKVQVTYEDESGQTQVRSEYKIQVLFKFRIPYYVGTLAKNSGWVNEDGKKLVARNVAAKNSWVVRNSDERVTPWNFEQVINKEASSINFIERMTNFDTYLPNEKVLPKNSLLYQEFIVNNELISSGYYLNGRKEYFLPEQRQRIITRLFKRYRKVSAKQMLDFLKNEYQIKLDDDPKKLFGLDTFVKVPSYNGSLSTVVDLTNKMGISEDLIANYPERFEEIIKWQTIFEDKKILKKTIREVNHNKWSGMLTAEQVNKLSKRHYTGWGRLSQKLLDGVKTSQGRTIIESLREGICDNFMRLIEDEKIAEFIANAQVAGAKDGVLAYDLVDQLPGSPAIKKGIWQSLRVLQELEHYLGRDAIGKVVIEMSRDDESSRRTKARKQQLEEFYKKFKESTGSDVTAELKRELSEKDAKEIDDEKVFLYFLQNGKSMYSGDQLYLSRLADYQVDHIVPQTYIKDDSLDNKVLVTQRDNQNKGGDTPSHTVVTRMNSYWDMLAKNGQVSPRKLANLKKGTITLKQREGFINRQLVENRQIIKHVANILTNYYTGTDTLVLTPKSGLTSQLRSGLIYELNPAFDEAKALDRGKAYQVERYTTVKLHDRFVKNRKLNDYHHAHDAYLNAFVAQYVYQEHPEWKNAWVYGKYPRNGQADFGKWATQRKQKSLQLLSSMANDVWNLEDPDTMEKTILNRDETFEQMRQTLCYRNINIVKKLETQTGKFGDESVYKKGNKADHYSLGLKRKYPPQKYGGTKGAISAVTALVKDNSGRVIPVSISASDYDSYQNASDKLAWLLMRKKNIAEILVASLPKYTKYELPSGALRLLASYQEAQSAVELPMLNLGLMDDEAKVLNLYDQLAQFIADNKLFTDKKIALLKGEMRVAFEGLEEFKDKQKVIDELLGVTNGSNQGLQALNSIGLGTSNQRLKSGNTMTNGVTLINESVTGLYSTRTTYN

SEQ ID NO: 887 - RNA, 22 nt, Weissella sp.
  source 1..22: mol_type = genomic RNA
gttttagtgtcatgttgaatag

SEQ ID NO: 888 - RNA, 70 nt, Weissella sp.
  source 1..70: mol_type = genomic RNA
ctattcaacatggcaagttaaaataagctttatgcgtattcaaacttttgttaaggcgacatcgcctttt

SEQ ID NO: 889 - protein, 1337 aa, Enterococcus sp.
MKKDYVIGLDIGTNSVGWAVMTEDYQLVKKKMPIYGNTEKKKIKKNFWGVRLFEEGHTAEDRRLKRTARRRISRRRNRLRYLQAFFEEAMTALDENFFARLQESFLVPEDKKWHRHPIFAKLEDEVAYHETYPTIYHLRKKLADSSEQADLRLIYLALAHIVKYRGHFLIEGKLSTENISVKEQFQQFMIIYNQTFVNGESRLVSAPLPESVLIEEELTEKASRTKKSEKVLQQFPQEKANGLFGQFLKLMVGNKADFKKVFGLEEEAKITYASESYEEDLEGILAKVGDEYSDVFLAAKNVYDAVELSTILADSDKKSHAKLSSSMIVRFTEHQEDLKNFKRFIRENCPDEYDNLFKNEQKDGYAGYIAHAGKVSQLKFYQYVKKIIQDIAGAEYFLEKIAQENFLRKQRTFDNGVIPHQIHLAELQAIIHRQAAYYPFLKENQKKIEQLVTFRIPYYVGPLSKGDASTFAWLKRQSEEPIRPWNLQETVDLDQSATAFIERMTNFDTYLPSEKVLPKHSLLYEKFMVFNELTKISYTDDRGIKANFSGKEKEKIFDYLFKTRRKVKKKDIIQFYRNEYNTEIVTLSGLEEDQFNASFSTYQDLLKCGLTRAELDHPDNAEKLEDIIKILTIFEDRQRIRTQLSTFKGQFSEEVLKKLERKHYTGWGRLSKKLINGIYDKESGKTILDYLIKDDGVSKHYNRNFMQLINDSQLSFKNAIQKAQSSEHEETLSETVNELAGSPAIKKGIYQSLKIVDELVAIMGYAPKRIVVEMARENQTTSTGKRRSIQRLKIVEKAMAEIGSNLLKEQPTTNEQLRDTRLFLYYMQNGKDMYTGDELSLHRLSHYDIDHIIPQSFMKDDSLDNLVLVGSTENRGKSDDVPSKEVVKKMKAYWEKLYAAGLISQRKFQRLTKGEQGGLTLEDKAHFIQRQLVETRQITKNVAGILDQRYNAKSKEKKVQIITLKASLTSQFRSIFGLYKVREVNDYHHGQDAYLNCVVATTLLKVYPNLAPEFVYGEYPKFQAFKENKATAKAIIYTNLLRFFTEDEPRFTKDGEILWSNSYLKTIKKELNYHQMNIVKKVEVQKGGFSKESIKPKGPSNKLIPVKNGLDPQKYGGFDSPVVAYTVLFTHEKGKKPLIKQEILGITIMEKTRFEQNPILFLEEKGFLRPRVLMKLPKYTLYEFPEGRRRLLASAKEAQKGNQMVLPEHLLTLLYHAKQCLLPNQSESLAYVEQHQPEFQEILERVVDFAEVHTLAKSKVQQIVKLFEANQTADVKEIAASFIQLMQFNAMGAPSTFKFFQKDIERARYTSIKEIFDATIIYQSTTGLYETRRKVVD

SEQ ID NO: 890 - RNA, 17 nt, Enterococcus sp.
  source 1..17: mol_type = genomic RNA
gttttagagtcatgttg

SEQ ID NO: 891 - RNA, 68 nt, Enterococcus sp.
  source 1..68: mol_type = genomic RNA
caacatagcaagttaaaataaggttttaaccgtaatcaactgtaaagtggcgctgtttcggcgctttt

SEQ ID NO: 892 - protein, 1340 aa, Enterococcus sp.
MKKEYTIGLDIGTNSVGWSVLTDDYRLVSKKMKVAGNTEKSSTKKNFWGVRLFDEGQTAEARRSKRTARRRLARRRQRILELQKIFAPEILKIDEHFFARLNESFLVPDEKKQSRHPVFATIKQEKSYHQTYPTIYHLRQALADSSEKADIRLVYLAMAHLLKYRGHFLIEGELNTENSSVTETFRQFLSTYNQQFSEAGDKQTEKLDEAVDCSFVFTEKMSKTKKAETLLKYFPHEKSNGYLSQFIKLMVGNQGNFKNVFGLEEEAKLQFSKETYEEDLQELLEKIGDDYIDLFVQAKNVYDAVLLSEILSDSTKNTRAKLSAGMIRRYDAHKEDLVLLKRFVKENLPKKYRAFFGDNSVNGYAGYIEGHATQEDFYKFVKKELTGIRGSEVFLTKIEQENFLRKQRTFDNGVIPHQIHLTELRAIIANQKKHYPFLKEEQEKLESLLTFKIPYYVGPLAKKQENSPFAWLIRKSEEKIKPWNLPEIVDMEDSAVRFIERMINTDMYMPHNKVLPKNSLLYQKFSIYNELTKVRYQDERGQMNYFSSIEKKEIFHELFEKNRKVTKKDLQEFLYLKYDIKHAELSGIEKAFNASYTTYHDFLTMSENKREMKQWLEDPELASMFEEIIKTLTVFEDREMIKTRLSHHEATLGKHIIKKLTKKHYTGWGRLSKELIQGIRDKQSNKTILDYLINDDDFPHHRNRNFMQLINDDSLSFKKEIKKAQMITDTENLEEIVKELTGSPAIKKGILQSLKIVDEIVGIMGYEPANIVVEMARENQTTGRGLKSSRPRLKALEESLKDFGSQLLKEYPTDNSSLQKDRLYLYYLQNGRDMYTGAPLDIHRLSDYDIDHIIPRSFTTDNSIDNKVLVSSKENRLKKDDVPSEKVVKKMRSFWYDLYSSKLISKRKLDNLTKIKLTEEDKAGFIKRQLVETRQITKHVAGILHHRFNKAEDTNEPIRKVRIITLKSALVSQFRNRFGIYKVREINEYHHAHDAYLNGVIALALLKKYPQLAPEFVYGEYLKFNAHKANKATVKKEFYSNIMKFFESDTPVCDENGEIFWDKSKSIAQVKKVINHHHMNIVKKTEIQKGGFSKETVEPKKDSSKLLPRKNNWDPAKYGGLGSPNVAYTVAFTYEKGKARKRTNALEGITIMEREAFEQSPVLFLKNKGYEQAEIEMKLPKYALFELENGRKRMVASNKEAQKANSFLLPEHLVTLLYHAKQYDEISHKESFDYVNEHHKEFSEVFARVLEFAGKYTLAEKNIEKLEKIYKENQTDDLAKLASSFVNLMQFNAMGAPADFKFFDVTIPRKRYTSLTEIWQSTIIHQSITGLYETRIRMGK

SEQ ID NO: 893 - RNA, 15 nt, Enterococcus sp.
  source 1..15: mol_type = genomic RNA
gttttagagctatgc

SEQ ID NO: 894 - RNA, 70 nt, Enterococcus sp.
  source 1..70: mol_type = genomic RNA
gcatagcaagttaaaataaggctttgtccgtcatcagcttttttaaagcagcgctgttctcggcgctttt

SEQ ID NO: 895 - protein, 1327 aa, Enterococcus sp.
MKKNYTIGLDIGTASVGWAVLTEDYDLVKRKMKISGNTQKKAVKKNFWGVRLFEQGETAEGRRLKRTTRRRIARRRQRIQYLRTIFDEAMNQVDANFFARLDESFSITDEKENERHPIFGNVAEEVAYHEQFRTIYRLREVLANSSEQADLRLIYLALAHIIKFRGHFLIEGELNTENSSVSGTFEQFIKVYNETFNVEKVLELTVDLDEIAKQKVSRMKRAELILSLFPEEKSTGDFAQFIKMIVGNQGNVKKTFSLNEDAKIQFSKEEYEENLETLLAEIGEDFRGVFDAAKSVYDAISLANILKVTDAATRAKLSSSMVARFKEHKEDLKALKQFVRDNLPDEYDDLFKNKKVAGYAGYIDGDATQEEFYKYLKKALAKTTGAEYFLAKIEQEDFLRKQRTFDNGVIPYQLHLEELKAIIRNQKPYYPFLDEEKISQLMTFRIPYYVGPLAQGQGNFAWLTRKESGKITPWNLNEKVDIEKSATDFVERMTNNDSYLPMEKVLPKHSLLYEKFTVYNELTKVRYMDDNGRVQNFSSKEKQQIVNDLFKQQRKVKKEILEAFIKNEYGIENPKVEGIEKAFNASLGTYHDLVKLGIRPALFEQPEYEQQFEQIVKILTVFEDRKMRRKQLEQFSDLLTEDEQKQLERKHYKGWGRLSAKLIHGIVDQKTQKTILDYLIDDDDLPRNRNRNFMQLINDENLSFKEEIEKIAFDNDKSTEEIVQELAGSPAIKKGILQSLKIVEEIIEIMGELPTNIVVEMARENQTTAQGNRASQARMKYLEESIKKLGSSILEDEPISKDANLLRNDRLFLYYLQNGRDMYTGDELDINNLSSYDIDHIIPQSFVKDDSIDNRVLTTQRINRGKSNTVPAESVVKDMRATWERLYASNLISKKKLNNLMKAVNGGLTEEDKAYFIQRQLVETRQITKNVAQILHQKYNNEQSSEKPVRVVTLKSALASQFRKDFSLYKIRELNDYHHAQDAYLNGVIAQALLKVYPKLEPEFVYGEYQKVSIRALNKATAKKETYSNIMKFFTNDEVLTNKETGEVLWNRQRDIKTIKKVMNYHQMNIVKKVEIQTGRFTKESIQPKGPSKKLIARKNNWAPVNYGGFDSPTVAYSVIITHEKGKAAKVVQQLVGIKILERQAFEQNEVAFLEGKGFIHPKVQLKLPKYSLYQFADGRRRLLASADEAQKGNQMVLPTELIELLYHAKHVNDSSGESLTYLENHRTKFAELLEVILQFTNRYVGAEDRQKTVRDLYEKNQDADMKELAPSFVQLLQLNKQGAPASFKFFGETIERSRYKNMTELNKATFINQSITGLYETQRRLV

SEQ ID NO: 896 - RNA, 15 nt, Enterococcus sp.
  source 1..15: mol_type = genomic RNA
gttttagagctatgc

SEQ ID NO: 897 - RNA, 66 nt, Enterococcus sp.
  source 1..66: mol_type = genomic RNA
gcatagcaagttaaaataaggcttagtccgtaaacaaactttggcactgtattcggtgcttttttt

SEQ ID NO: 898 - protein, 1063 aa, synthetic construct
MRELDYRIGLDIGTNSIGWGVIELSWNKDRERYEKVRIVDQGVRMFDRAEMPKTGASLAEPRRIARSSRRRLNRKSQRKKNIRNLLVQHGVITQEELDSLYPLSKKSMDIWGIRLDGLDRLLNHFEWARLLIHLAQRRGFKSNRKSELKDTETGKVLSSIQLNEKRLSLYRTVGEMWMKDPDFSKYDRKRNSPNEYVFSVSRAELEKEIVTLFAAQRRFQSPYASKDLQETYLQIWTHQLPFASGNAILNKVGYCSLLKGKERRIPKATYTFQYFSALDQVNRTRLGPDFQPFTKEQREIILNNMFQRTDYYKKKTIPEVTYYDIRKWLELDETIQFKGLNYDPNEELKKIEKKPFINLKAFYEINKVVANYSERTNETFSTLDYDGIGYALTVYKTDKDIRSYLKSSHNLPKRCYDDQLIEELLSLSYTKFGHLSLKAINHVLSIMQKGNTYKEAVDQLGYDTSGLKKEKRSKFLPPISDEITNPIVKRALTQARKVVNAIIRRHGSPHSVHIELARELSKNHDERTKIVSAQDENYKKNKGAISILSEHGILNPTGYDIVRYKLWKEQGERCAYSLKEIPADTFFNEPILEVDHILPYSQSFIDSYHNKVLVYSDENRKKGNRIPYTYFLETNKDWEAFERYVRSNKFFSKKKREYLLKRAYLPRESELIKERHLNDTRYASTFLKNFIEQNLQFKEAEDNPRKRRVQTVNGVITAHFRKRWGLEKDRQETYLHHAMDAIIVACTDHHMVTRVTEYYQIKESNKSVKKPYFPMPWEGFRDELLSHLASQPIAKKISEELKAGYQSLDYIFVSRMPKRSITGAAHKQTIMRKGGIDKKGKTIIIERLHLKDIKFDENGDFKMVGKEQDMATYEAIKQRYLEHGKNSKKAFETPLYKPSKKGTGNLIKRVKVEGQAKSFVREVNGGVAQNGDLVRVDLFEKDDKYYMVPIYVPDTVCSELPKKVVASSKGYEQWLTLDNSFTFKFSLYPYDLVRLVKGDEDRFLYFGTLDIDSDRLNFKDVNKPSKKNEYRYSLKTIEDLEKYEVGVLGDLRLVRKETRRNFH

SEQ ID NO: 899 - protein, 1064 aa, synthetic construct
MSELDYRIGLDIGTNSIGWGVIELFWNKDRERYEKVRIVDKGVRMFDKAEIPNKGASLAEPRRIARSSRRRLNRKSQRKKEIRNLLVQHGMITQEELDLLYPLSKKSIDIWDIRLDGLDRLLNHLEWARLLIHLAQRRGFKSNRKSELKDAETGKVLSSIQVNEKRLFLYRTVGEMWIKDAEFSKYDRRRNSPNEYVFSVSRADLEKEIVTLFEAQRKFQSSYASKNLQETYLQIWAHQLPFASGNAILNKVGYCSLLKGKERRIPKATYTFQYFSALDQVNRTRLGPDFQPFTQEQKEIILDKMFQRTDYYKKKTIPEVSYYDIRKWLELDETIQFKGLNYDPNEELKKIEKKPFINLKAFYEIKKVVANYAERTNEAFSTLDYDAIAYALTVYKTDKDIRSYLKKSNNLSKRCYDDQLIEELFTLSYTKFGHLSFKAINHVLPIMQEGRTYQEAIHQLGYDTTNLKKENRSMFLPLIPDEITNPIVKRAITQARKVVNAIIRRYGSPNSVHIELARELSKSHDERKKIMTAHDENYKKNKGAISILIENGILNPTGYDIVRYKLWKEQGERCAYSLKEIPPDTFFNEPILEVDHILPYSQSFIDSYHNKVLVYSDENRNKGNRIPYTYFLETNKDWEAFERYVRSNKLFSKKKREYLLKKTYLPRESELIKERHLNDTRYASTFLKNFIEQNLQFKEVEVNLRKKRVQTVNGVITAHLRKRWGLEKNRQETYLHHAMDAIIVACTDHHMVTRITEYYQIKESNKSVKKPYFPMPWEGFRDELLSHLASQPIAKKISEELKAGYQSSDYIFVSRMPKRSVTGAAHDQTIRRKGGIDKKGKTIIIKRVRLKDIKFDENGDFKMVGKEQDLATYEAIKQRYLEHRKNSKKAFETPLYKPSKKGTGNLIKRVKIEGQTKAFVREVNGGVAQNSDLVRVDLFEKDDKYYMVPIYVPDTVCSELPKKVVKSGKGYEQWLTLDNSFTFKSSLYPYDLVRLVKGNEDRFLYFGTLDIDSDRLNFKDVNKPSKQNEYRYSLKTIENLEKYEVGVLGDLRLVKQETRRIFNR

SEQ ID NO: 900 - protein, 1055 aa, Brevundimonas vesicularis
MTTRLGLDVGTNSIGWALIDKDSARIIDLGSRIFSDGRDPKSGASLAVDRREARAARRRRDRYLGRRSAFLETLIQHGLMPERADDAKLVAAKDPYALRARALDEPLEPHEIGRALFHLNQRRGFKSNRKAERGRKENEDGKIESGAKALDTAMTVAKARTLGEFLHTQNAKRVRMGGDNQTYDFYPQRRHVETEFAVLWAAQKAHHPALLTDAAEEALHRILFFQRDLKDQEVGLCTFAGWNDVPENERRLPKTHPLFQERRLYEEVNHLKIVSPGAKDRDLTLAERDAVLLKLRDTRKSSFSALGKLIKLGEGERFNKESETRKDLLGDEVRAELADKKRFGARWTFFDIAEQLKIIDRIQNEADPEVLLDWLKAEYGLDDASAVAVSKARLPEGYGRFGETATRRLIDALKAQVVTYDKAALAAGFHHSDRRTGEVWERLPYYGQILTTEIAPGKAEHGDDNERRFGKITNPTVHIELRQLEKLVNAVITVHGRPDEIVVELARELKLNEEDRKKHDARIRRDTAAAIARGEKLEAEGIPDTGANRMAMRMWEDLNPGNPLDRRCPYCAEVIGIRALFSGEADIDHIIPYSQSLDDSAGNKVVAHRHCNRAKGNKTPYERWGHDEARWEIISAQVARMHRSKQWRFGPEARERLEKEGGFIARQLTDTQYLSRATAKYLSSLYTPDEGRRVYALPGRMTAMLRRLWGLNSLLPDHNFVENEHSNAPKNRLDHRHHTIDGAVAAVTDASLMQRIATVAARAEENELDRLFEDLAPPWPTFREELKERLARVTVSHKPDHGRKGRPDRTRDVTAGRLHNDTAYGFTGQVAADGKTPIVVHRVPFASLKPADILDPTRIPDTALREALFEATRDLTGKSYDQAMARFAKQHPVFKGIRRVRVREALNVIPIRSKEGRPYKAYKGDSNARYDVWRLPNGKWVTDIVSMFDAHSPEASDRRPHPAAKKVLSLRQNDMLAIERDGGEAQIVRVVKFSRSGLILAGQNEAGPLKARDAAPNETDPFRYISASASSLKRDNARQIRIDPLGRVFDPGPRD

SEQ ID NO: 901 - RNA, 25 nt, Brevundimonas vesicularis
  source 1..25: mol_type = genomic RNA
gttgccgctggccttcgatttctga

SEQ ID NO: 902 - RNA, 80 nt, Brevundimonas vesicularis
  source 1..80: mol_type = genomic RNA
tgtcagaaatcgaaggctggctgttaacaagcagctagactgcaccaaataagggcggggctacggccccgtcttttttt

SEQ ID NO: 903 - protein, 1079 aa, Bacillus endophyticus
MKDLDYRIGLDIGTNSIGWSIIKLQFNDTTQRYEKSGIIDLGVRMFDKAEIPKTGASLSEPRRLARSSRRRLKRKSERKQIIRRLLVDFDILSQEELDHLFPLPKDSVDIWDIRLEGLERVLNRFEWARLLLHLAQRRGFKSNRKSQRNETETGKMLASIYDNKNRLSAYRTVGEMWMKDKKFAQYDKRRNSPDEYIFNVSRDDLEKEIMTLFEAQRKFLSEYASEQLQEAYLKVWSHQLPFASGNDILKKVGHCSLEKNERRIPKATYTFQYFAALDKINNLRLGDYVQPLRQEQQKLLLKKMFERIDFVKKKSIPIIKYSDLRKWLKLDESICFKGLTYNPNEKLSKVEKKEFINLKPYYEMKKVISKHYEKHENIYEVADFDTFGYALTIYKNDQDIRSYLRNSNNIGKKVYDEALIEDLLNLSYTKFGHLSFKALQNLIPIMEEGKSFVDATKELSYDTTGLKKTKKSRLLPPIPDDITNPIVKRSLTQSRKVVNSIIKTYGPPLSIHIELARELSKDHEERRKISKTQDENYRRNKGAIEVLLENGIINPKGYDIVRYKLWKEQRECCAYSLKKIPADVFFSELRRERGSSPILEVDHILPYSQSFMDSYHNKVLVYSDENRKKGDLIPYDYIKGEEQRWKDFESYVQTNNLFSKKKREYLLKKEYTSRESDMVKERHLNDTRYATRFFKNFMEQRLLFKEAKVSMKKRVQTVNGIITSHFRSRWGLEKVREDTYLHHALDAVVVACTDHHMVTRVTEYYKHKESSLKSRKPFFPWPWKGFRDELLTRLTSQPVPDKISEALQLGTSLPDYRIVSRMPKRSITGAAHKETIMMKGGIDEKTGKTIIVKRVALKDIKFDKNGDFEMVGKEQDMATYTAIKERYLQHKKNAEKAFEKPIYKPSKKGRGNPIKRVKVVFESKAFVREVNGGVANNEKLVRVDLFEKDGKYSMVPIYVMDTVTEKLPDKIVTIGKGHHQWRRLDESYTFLFSLHPYDLVRVRSEEADTFFYFGSIDINSNRIHFKHVNHPTKPNELRYALGKIDLLEKYEIGLLGDIKQVKKETRNTFHQPKKQLTME

SEQ ID NO: 904 - RNA, 14 nt, Bacillus endophyticus
  source 1..14: mol_type = genomic RNA
gtcatagttccact

SEQ ID NO: 905 - RNA, 89 nt, Bacillus endophyticus
  source 1..89: mol_type = genomic RNA
acagcaatggctttgatgtttctatgataagggtttcgacccgtggcgttggggatcgcctgcccatttcgatgggcgtctccccattt

SEQ ID NO: 906 - protein, 1081 aa, Bacillus megaterium
MKNLDYRIGLDIGTNSVGWSVIELNFNQTTNRYEKVGIIDFNVRMFNKAEIPKTGASLAEPRRQFRSTRRQLKRKSIRKQKIRKLLIAQDVISQQELDNLYPLSKGSVDIWDIRVEGLDRYLNKIEWSRLLLHLAQRRGFKSNRKSDNQETEQGKVLPIIQENKQLLCSYRTVGEMWMKDEKFATSDKRKNTNDNYLFNVSREDLKQEIQLLFQQQRQFGSLYASEQTEKEYLDIWEHQLPFASGHDILKKVGYCSLEPKERRIPKATYTFQYFTVIDKLNNLRLGSHFEPLTKDQRDILLQKIMERTDFINKKTIPSIRYSDIRKWLALDDSIQFKGLIYEPNEKTQKIEKKEFVNLKPYYEIKKVILLHSEKTGETYTNMDIDTIGYALTVYKTDKDIRAYFRNSHNLSQKVFDDALIDELLNLSYTKFGHLSIKALRRLLPYLEEGLSYAEAVNKVGYDTTNLKGKKKERLLPKIPDDITNPIVKRSLTQARKVVNAIIRKYGSPLTVHIELARELSKNTNERKKLSKAQTKNYERNQDAIAILVENGILNPTGYDIVRYKLWKEQDERCMYSLRKIPAEQFFAELRRERGSTPLLDVDHILPYSQSFLDGYDNKVLVFSDENRKKGSRIPFYYLQENPKKWLDFEAYVQSNEKLSKKKRGYLVKKVYTARESDDVKERHLNDTRYATRFLKNFIEQFLVFKEAQIPMKKRVQTLNGRITSHFRSRWGFEKLREDTYLHHAVDAVVVACTDQHMVNKVTDYYKSKEQSLKSNAPYFPWPWERFRDEMLTRLHAQPVPDQIKQAITGYSPLSDYRLVSRMSKHSVTGAAHKETIMMNGGENNKTGKTIIVKRMLLKEIKFDNNGDFKMVGKEQDPATYQAIKQRYLSYDKDAEKAFEKPLYKPSKKGHSNLIKRVKVEIQEKTFVREVNGGVAENGDLVRIDLFKKEDTYYMIPIYVLDTSSPELPDHIVTSGKGYKLWKKLDESYTFQFSLTPYDLIRVKINEKDQFLYFSTIDISNNRIICKHVNKPSVPKECTYSLTKIEIIEKCKVGILSDVSFVKNEKRRSFGHPAKKVALQTR

SEQ ID NO: 907 - RNA, 25 nt, Bacillus megaterium
  source 1..25: mol_type = genomic RNA
gtcatagtcccatcatatccattgc

SEQ ID NO: 908 - RNA, 102 nt, Bacillus megaterium
  source 1..102: mol_type = genomic RNA
acagcaatggatatgatgtttctatgataagggctctctaagagagacctgtggcgttggggatcgcctgcccgtttcgacgggtgtctccccatttcattt

SEQ ID NO: 909 - protein, 1081 aa, Bacillus megaterium
MRNLDYRIGLDIGTNSVGWSVIELNFNQTTNRYEKVGIIDFNVRMFNKAEIPKTGASLAEPRRQFRSTRRQLKRKSIRKQKIRQLLVTHDVISQQELDNLYPLSKGSIDIWDIRVEGLDRYLNKIEWSRLLLHLAQRRGFKSNRKSDNQETEQGKILPIIQENKQLLCSYRTVGEMWMKDEKFATSDKRKNTNDNYLFNVSREDLKREIQLLFQQQRQFGSLYASEQTEKEYLDIWEHQLPFASGHDVLKKVGYCSLEPKERRVPKATYTFQYFTVIDKLNNLRLGSHFEPLTKEQRDILLQKIMERTDFINKKTTPSIRYSDIRKWLTLDDSIQFKGLIYEPDEKTQKIEKKEFVNLKSYYEIKKVILLHSEKTGETYTNMDLDTIGYALTVYKTDKDIRAYLRNPHNLSQKVFDDVLIDELLNLSYTKFGHLSIKALHRLLPYLEEGLSYAEAVNKVGYDTTNLKGKKKERLLPKIPDDITNPVVKRSLTQARKVVNAIIRKYGSPLSVHIELARELSKNASERKKLSKAQTKNYERNQGAIAILVENGILNPTGYDIVRYKLWKEQDERCMYSLRKIPSEQFFAELRRERGSTPLLDVDHILPYSQSFLDGYDNKVLVFSDENRKKGDRIPFDYLQENPKKWLDFEAYVQSNEKLSKKKRGYLVKKVYTARESDDVKERHLNDTRYATRFLKNFIEQFLFFKEAQIPMKKRVQTLNGRITSHFRSRWGFKKIREDTYLHHAVDAVVVACTDQHMVNKVTDYYKSKEQSLKSNAPYFPWPWEGFRDEVLTRLHAQPVPDQIKQAITSYSPLPNYRLVSRMSKHSVTGAAHKETIMMNGGENNKTGKTIIVKRMLLREIKFDDNGDFKMVGKEQDPATYQAIKQRYLSYDKDAKKAFDKPLYKPSKKGHSNPIKRVKVEVQEKTFVREVNGGVAENGDLVRIDLFKKEDTYYMIPIYVLDTSSPELPDHIVTSGKGYKLWKKLDESYTFQFSLTPYDLIRVKINEKDQFLYFSTIDISNNRIICKHVNKPSVPKECTYSLTKIEVIEKCKVGILSDVSFVKNETRRSFGQPTKKVALQTR

SEQ ID NO: 910 - RNA, 24 nt, Bacillus megaterium
  source 1..24: mol_type = genomic RNA
gtcatagtcccatcatatccattg

SEQ ID NO: 911 - RNA, 102 nt, Bacillus megaterium; identical to SEQ ID NO: 908
  source 1..102: mol_type = genomic RNA

SEQ ID NO: 912 - protein, 1103 aa, Bosea thiooxidans
MDWRFGGDLGTNSIGWAAAELVLVDGVWTPKRVVAAGSRIFSDGREPKSGASLAGARRDARAMRRRRDRFKQRQAALLKYLTLAGFFPSDAEERRKLAEVDPYELRARALDEALPHPHLGRALFHLNQRRGFKSNRKADRGRNDDDSGKIRIGVRELHAQMDAAGARTLGEFLHGRRAGADQNAIPLVRTRIVAHLAEDGKASEAYNFYPDRRMLEDEFEAVWEAQIPHHPDALTPERKAQFHEIIFHQRPLKEPKIGYCTLRPPEPRLPKAHPLFQRRRLLEEVNALKIVLPGAEARALEKPERDSLLSKLAAKKTVAYASLRKALKLDPDARFNKESDNRKDMKGDEVAAEMSHAKRFGKAWLGMSPETQWQVVDRLRQLESDEQVADFEAWLRERHGLSHEQAQAVTGARLPEGYGRFGETATRALIEALKEKVIVYSEAVTEAGLGHHSDFRDGQVWQDEKGNPALPYYGEILERHILPGTADPADDDVVSRIGRLTNPTVHIGLNQLRRVLNTLIRRYGPPLEIAIELARELKLDEERKREINTRNRENREAAEKRSKKLNELGQADKGGNRALLKLWEELNRDNVLDRRCVYSGRKISMEMLFSGAVEVDHILPFSATLDDSGGNRILCLREVNRIKRKRTPWEAQADLRAHFGPDAEWEAIAARAARLPKEKRWRFEPDAIHRFDAQGGFLARHLTDTQHLSRLAREYLSALYPERGEGSSHVWVSPGRLTEMLRRAWSLNHHLPDHNLAGHASQPKNRKDHRHHAIDAIVVAVTDRSLLNRIAREAGRHGHEEASRVVADIPEPWDGFSDEVGRVLRSIVVSHRPDHGTASKAGLARQKDATAARLHNETAYGLTGEKDARGLDIVVTRKPLSSFRKPADLDAIRDEDLKRKLKDWTAGKEGGAFEQAMRAFGHLERGPRSYPGLRRIRVVEPLSVIPIKDREGRAYKAYKGDSNHRFDMWELTNGKWKDEVVSMFEAHQRDWVSPIRAANPTARKVLSLQQNDVIAIEQEDGRKLMRVVKFSAGTLVLALPQEAGSLKTRDADKDDPFRYVYGSPSSLLRWKARQVRIDEIGRVLDPGFPARKPRAGKTRGEEA

SEQ ID NO: 913 - RNA, 25 nt, Bosea thiooxidans
  source 1..25: mol_type = genomic RNA
gttgccgctggaccgcgatctctga

SEQ ID NO: 914 - RNA, 77 nt, Bosea thiooxidans
  source 1..77: mol_type = genomic RNA
tcagagatcgcggtctggctgttaacaagcagtcaagtctgcaccagataagggcgacgctccggcgtcgccttttt

SEQ ID NO: 915 - protein, 1130 aa, unidentified
MSKVAKNMTRVNLGFDIGIASVGWSVLDNQTGKILETGVSIFPSGSASRNEERRSFRQSRRLIRRKKARICDMDHLLKKNGFPFPGNTGANPYEIRVKGLTEKLSREELAIALHHLVKRRGISYDLKDVEDESAGGTNYQESIAVNQRLLKKETPAEIQLARLTECGKVRGQVKSLGEDNTATTLLNVFPNAAYQEEMVKLLKKQQEFYGEIDDPFMETAIGILSRKREYFIGPGSEKSRTDYGIYRTDGTTLKNLFEILVGKDKIFPDQYRAAGNSYTAQLYNLLNDLNNLEVDATEDGKLTTAHKEQIIEELTTTTGNVNMLKLIAKVAGTSPAGIKKYRVDREGKPEFHSLAIYRRLRKKLGEAGFEINEWPPEFFDDYGPIVTLNTESGELRKWLAEEGSRKYDFLTEPVIEAILANKSAFDSVGKNKWHRFSLKTMQLLIPELLHTFKEQMTILAEMGLLHENKKDYGDQNKVDVKYLTENLYNPVVRKSVKQAMDIFNALFEKYANIDYVVIEMPRDDAEDELEQKKQFQKFQLKNEKEKDASLKEFQELAGVSDLQLEAQLRKRKKLRQKIRMWYQQRGKCPYSGKTIAAVDLFHQDNQFEIDHIIPLSVSFDDGQNNKVLCYSEMNQEKGKQTPYAFMSRGGGQGFSALQAYVKSNNRLENAKKRNLLFTEDINDLEVRKRFIARNLVDTRYASRIVLNELQQFVRSKELDTRVTVIRGKLTSKLRDRWRLNKSRETHHHHAVDAAVIAVSPMLKMWEKNAEIIPLKVDENTVDLKSGEIITDQEYAAQMYELPYARFLEQMPELHKKIKFHHQVDKKMNRKVSDATLYSTRKAKVGTDKKEQEYVIGKIKDIYQFDQYKKFKKLYDGDKSKFLMQRLDPQTFAKLEKIMEDYPAKIDATQPNGTIKLVDISPFELYRREHGPVTKYAKKNNGPAIKSLKFYDSIVGSSVKITPKNAKGKEVILKSLKPWRTDVYYNHEKEQYEIMGIKYADLKFKGDNYGITKARYQEIKEEEGVSEESEFLFSLYRGDRIQVSNGEDKIDLLFLSRSNPAKKGYVELKPIDRNQLNGKEVVSVYGAASGGRLKKQFVKKNHTLHKVNTDILGNPFYIKKESDQPKNILDL

SEQ ID NO: 916 - RNA, 24 nt, unidentified
  source 1..24: mol_type = unassigned RNA
gtttttgtactctcaaggaatcag

SEQ ID NO: 917 - RNA, 85 nt, unidentified
  source 1..85: mol_type = unassigned RNA
taccattactgattccttgagaatctacaaaaataaggctttatgccgaaattcccactcttaacggagtgggttttttattttt

SEQ ID NO: 918 - RNA, 12 nt, Streptococcus pyogenes
  source 1..12: mol_type = genomic RNA
gttttagagcta

SEQ ID NO: 919 - RNA, 65 nt, Streptococcus pyogenes
  source 1..65: mol_type = genomic RNA
tagcaagttaaaataaggctagtccgttatcaacttgaaaaagtggcaccgagtcggtgcttttt

SEQ ID NO: 920 - RNA, 81 nt, synthetic construct
  source 1..81: mol_type = other RNA
gttttagagctagaaatagcaagttaaaataaggctagtccgttatcaacttgaaaaagtggcaccgagtcggtgcttttt

SEQ ID NO: 921 - protein, 9 aa, synthetic construct
LAGLIDADG

SEQ ID NO: 922 - protein, 7 aa, synthetic construct
PKKKRKV

SEQ ID NO: 923 - protein, 16 aa, synthetic construct
KRPAATKKAGQAKKKK

SEQ ID NO: 924 - DNA, 318 bp, synthetic construct
  source 1..318: mol_type = other DNA
tgtacaaaaaagcaggctttaaaggaaccaattcagtcgactggatccggtaccaaggtcgggcaggaagagggcctatttcccatgattccttcatatttgcatatacgatacaaggctgttagagagataattagaattaatttgactgtaaacacaaagatattagtacaaaatacgtgacgtagaaagtaataatttcttgggtagtttgcagttttaaaattatgttttaaaatggactatcatatgcttaccgtaacttgaaagtatttcgatttcttggctttatatatcttgtggaaaggacgaaacacc

SEQ ID NO: 925 - DNA, 300 bp, synthetic construct
  source 1..300: mol_type = other DNA
agctccacggcaagagaattcaaagccgcgggcctgggttccacgcggggccccttacccaaggtgccccgggcgctcatttgcatgtcccacccaacaggtaaacctgacaggtcagtcgcggccgggtacggcctggcggtcagagcaccaaacgtacgagccttgtgatgcggttccattgcatgaaattctcctaaaggccccaagatgaacgggaaagcgcgcggttcgctcaccgtaactaaaacaggtgagagactcccgtgccttataaggcctgtggacggaggcagttgc

SEQ ID NO: 926 - DNA, 300 bp, synthetic construct
  source 1..300: mol_type = other DNA
tgttctccgaacagtacttgtaatatacaggttccccgatccaccaccgtctgcgggtggcggtacagcctctcccagtgtgctttgcgctcatttgcatagagcacggcaccgaacgcagccactgtcccccgcgtccgctgtcccccgtgcaggccaaacccgggcgcggccccgccgacggtgggtacagagagtggtcggctcggcaccggctgctgcgcggcaccggcactcaccctgtccttatggagccctaactccatggctataaatatctaaggggaggaagggtagatc

SEQ ID NO: 927 - DNA, 300 bp, synthetic construct
  source 1..300: mol_type = other DNA
agcgctccgcggagacttctgggacgcggcggctccgactccgccccgcttccggcttatttgcatacagcaattcctagcaggccctgtgctgaatttagtcggaaaactaccatgttcagtcgaaaaagcaaatacttttgtcagatatggccaaaaacttcacttgacttagccgtgtttcatgtaaagcattaaaaggatggagtgattgttcaaatttcataagaagaattcaccttcagtttaaggtggttcgctttctgcacttcaaataccgcggtggacagaccctgtttc

SEQ ID NO: 928 - DNA, 300 bp, synthetic construct
  source 1..300: mol_type = other DNA
gcctgagtcgcgccgccgcctcccaaagacttctgggaaggcggtgcggctcaggctccgccccgcttccggggatatttgcatacgagcattcccagtaattcccagcagccactgtagctatatttggtagaataacgagcactttctgaactccagttaataactgcgttagttgcgttacacattggactaaaacaaatagaagttgaatctctagagcagtggagataagtcgccgtatgtgtacagaaattgcttccgggggctataaatagctggtagtggggctagaacgtc

SEQ ID NO: 929 - DNA, 300 bp, synthetic construct
  source 1..300: mol_type = other DNA
cgcccgcgcagcgcagccgcttcccagagacttctgggacggcagcggctgcggctccgcccctcttccagtataatttgcatgcgaccatggattcccagcagccacctgagtcatatttggtggaacaaaaaccactttctcaatttcagtgaatgaccccatttggttaaggtattgttgcacaaatatcataaaagaagggacgaatggctgaaccggtttttaatggagttcgcccttagcgtaaaagagtttattctatgccctctaaatagttctgggatcaaccgtactact

SEQ ID NO: 930 - DNA, 111 bp, synthetic construct
  source 1..111: mol_type = other DNA
ccccttacccaaggtgccccgggcgctcatttgcatgtcccaccgctcaccgtaactaaaacaggtgagagactcccgtgccttataaggcctgtggacggaggcagttgc

SEQ ID NO: 931 - DNA, 111 bp, synthetic construct
  source 1..111: mol_type = other DNA
acagcctctcccagtgtgctttgcgctcatttgcatagagcacgactcaccctgtccttatggagccctaactccatggctataaatatctaaggggaggaagggtagatc

SEQ ID NO: 932 - DNA, 111 bp, synthetic construct
  source 1..111: mol_type = other DNA
ggctccgactccgccccgcttccggcttatttgcatacagcaatattcaccttcagtttaaggtggttcgctttctgcacttcaaataccgcggtggacagaccctgtttc

SEQ ID NO: 933 - DNA, 111 bp, synthetic construct
  source 1..111: mol_type = other DNA
gctcaggctccgccccgcttccggggatatttgcatacgagcatagtcgccgtatgtgtacagaaattgcttccgggggctataaatagctggtagtggggctagaacgtc

SEQ ID NO: 934 - DNA, 111 bp, synthetic construct
  source 1..111: mol_type = other DNA
gctgcggctccgcccctcttccagtataatttgcatgcgaccatgttcgcccttagcgtaaaagagtttattctatgccctctaaatagttctgggatcaaccgtactact

SEQ ID NO: 935 - protein, 1493 aa, synthetic construct
MPNEGIPHSSQTQEQDCLQSQPVSNNEEMAIKQESGGDGEVEEYLSFRSVGDGLSTSAVGCASAAPRRGPALLHIDRHQIQAVEPSAQALELQGLGVDVYDQDVLEQGVLQQVDNAIHEASRASQLVDVEKEYRSVLDDLTSCTTSLRQINKIIEQLSPQAATSRDINRKLDSVKRQKYNKEQQLKKITAKQKHLQAILGGAEVKIELDHASLEEDAEPGPSSLGSMLMPVQETAWEELIRTGQMTPFGTQIPQKQEKKPRKIMLNEASGFEKYLADQAKLSFERKKQGCNKRAARKAPAPVTPPAPVQNKNKPNKKARVLSKKEERLKKHIKKLQKRALQFQGKVGLPKARRPWESDMRPEAEGDSEGEESEYFPTEEEEEEEDDEVEGAEADLSGDGTDYELKPLPKGGKRQKKVPVQEIDDDFFPSSGEEAEAASVGEGGGGGRKVGRYRDDGDEDYYKQRLRRWNKLRLQDKEKRLKLEDDSEESDAEFDEGFKVPGFLFKKLFKYQQTGVRWLWELHCQQAGGILGDEMGLGKTIQIIAFLAGLSYSKIRTRGSNYRFEGLGPTVIVCPTTVMHQWVKEFHTWWPPFRVAILHETGSYTHKKEKLIRDVAHCHGILITSYSYIRLMQDDISRYDWHYVILDEGHKIRNPNAAVTLACKQFRTPHRIILSGSPMQNNLRELWSLFDFIFPGKLGTLPVFMEQFSVPITMGGYSNASPVQVKTAYKCACVLRDTINPYLLRRMKSDVKMSLSLPDKNEQVLFCRLTDEQHKVYQNFVDSKEVYRILNGEMQIFSGLIALRKICNHPDLFSGGPKNLKGLPDDELEEDQFGYWKRSGKMIVVESLLKIWHKQGQRVLLFSQSRQMLDILEVFLRAQKYTYLKMDGTTTIASRQPLITRYNEDTSIFVFLLTTRVGGLGVNLTGANRVVIYDPDWNPSTDTQARERAWRIGQKKQVTVYRLLTAGTIEEKIYHRQIFKQFLTNRVLKDPKQRRFFKSNDLYELFTLTSPDASQSTETSAIFAGTGSDVQTPKCHLKRRIQPAFGADHDVPKRKKFPASNISVNDATSSEEKSEAKGAEVNAVTSNRSDPLKDDPHMSSNVTSNDRLGEETNAVSGPEELSVISGNGECSNSSGTGKTSMPSGDESIDEKLGLSYKRERPSQAQTEAFWENKQMENNFYKHKSKTKHHSVAEEETLEKHLRPKQKPKNSKHCRDAKFEGTRIPHLVKKRRYQKQDSENKSEAKEQSNDDYVLEKLFKKSVGVHSVMKHDAIMDGASPDYVLVEAEANRVAQDALKALRLSRQRCLGAVSGVPTWTGHRGISGAPAGKKSRFGKKRNSNFSVQHPSSTSPTEKCQDGIMKKEGKDNVPEHFSGRAEDADSSSGPLASSSLLAKMRARNHLILPERLESESGHLQEASALLPTTEHDDLLVEMRNFIAFQAHTDGQASTREILQEFESKLSASQSCVFRELLRNLCTFHRTSGGEGIWKLKPEYC

SEQ ID NO: 936 - protein, 22 aa, synthetic construct
DYKDHDGDYKDHDIDYKDDDDK

SEQ ID NO: 937 - protein, 431 aa, Homo sapiens
MPNPRPGKPSAPSLALGPSPGASPSWRAAPKASDLLGARGPGGTFQGRDLRGGAHASSSSLNPMPPSQLQLPTLPLVMVAPSGARLGPLPHLQALLQDRPHFMHQLSTVDAHARTPVLQVHPLESPAMISLTPPTTATGVFSLKARPGLPPGINVASLEWVSREPALLCTFPNPSAPRKDSTLSAVPQSSYPLLANGVCKWPGCEKVFEEPEDFLKHCQADHLLDEKGRAQCLLQREMVQSLEQQLVLEKEKLSAMQAHLAGKMALTKASSVASSDKGSCCIVAAGSQGPVVPAWSGPREAPDSLFAVRRHLWGSHGNSTFPEFLHNMDYFKFHNMRPPFTYATLIRWAILEAPEKQRTLNEIYHWFTRMFAFFRNHPATWKNAIRHNLSLHKCFVRVESEKGAVWTVDELEFRKKRSQRPSRCSNPTPGP

SEQ ID NO: 938 - protein, 396 aa, Homo sapiens
MPNPRPGKPSAPSLALGPSPGASPSWRAAPKASDLLGARGPGGTFQGRDLRGGAHASSSSLNPMPPSQLQLSTVDAHARTPVLQVHPLESPAMISLTPPTTATGVFSLKARPGLPPGINVASLEWVSREPALLCTFPNPSAPRKDSTLSAVPQSSYPLLANGVCKWPGCEKVFEEPEDFLKHCQADHLLDEKGRAQCLLQREMVQSLEQQLVLEKEKLSAMQAHLAGKMALTKASSVASSDKGSCCIVAAGSQGPVVPAWSGPREAPDSLFAVRRHLWGSHGNSTFPEFLHNMDYFKFHNMRPPFTYATLIRWAILEAPEKQRTLNEIYHWFTRMFAFFRNHPATWKNAIRHNLSLHKCFVRVESEKGAVWTVDELEFRKKRSQRPSRCSNPTPGP

SEQ ID NO: 939 - DNA, 14497 bp, Homo sapiens
  source 1..14497: mol_type = genomic DNA
aaaatttcaaaatttccgtttaagtctcataatcaagaaaaggagaaacacagagagagagaaaaaaaaaactatgagaacccctccccaccccgtgattatcagcgcacacactcatcgaaaaaaatttggattattagaagagagaggtctgcggcttccacaccgtacagcgtggtttttcttctcggtataaaagcaaagttgtttttgatacgtgacagtttcccacaagccaggctgatccttttctgtcagtccacttcaccaaggtgagtgtccctgctctcccctaccagatgtgggccccattggaggagatggcagggaggtaggcacggcgggggggtcaggggccctctggtacagtgggatgtacccagctaccgtgattccagccaggtaaggtctttaaaaaaataatagaataaatggcagaagacttaaaggtgaagtacttaatgcatgggcaggggcaaaaataaatgaattcatcaattgatacgtagatggataggatttttaaaatatgtcagctgccagtctttatggatttcagagctttgaacaacttgaaatgctgtccaggtgcaactgaaaatttcaactgcatctctctcatctctttgtctcttagctcttgatgcctctcatccttctctgtctctctgctcaccctgtcttgctcttttacatgtttctctgcctctctttctcccgccatctgtctgtcgctacactcagactctctttccccgcatctctcctggcctctgaccatctcccctatctctgtctcctccatcttgaccacactccatcgatctcctttcctccatctctcccgctctcttttcttgccttcccccacctgccttcccagccagcatccagcctagagctttgtacacagctggcgtttaataatagtaatgtcgccgaggacctttacattttatgagagtgagcatcagttctgttcaccctagtagcaggaggattgcaaggtgccggggcaagctgagcacttaactgaactttgcttgtatcgctttagaggagacccttggggcgggggggcagggagcacttcacaccattgtcaaccgtagtttagctgtgtggacctaccccaggactgcatgtgtgtgaccagagtccatattcaggaagcaaacaggttgttcagggctggggtgagctcgattctgcaggcttagcacagcgtttggcacaaagtaagtgctcacgaagtgttagctattagtatttctgtaaccaaattagaatcatgctatatattggttttgttcctgctttattcaattaacagtagtgtttttgaagcttactaaaaattgtttgaacacatgatctttcatgatggacaagactgtcctcacatcagcatgaactttgattgatttgaccaagtgccgattgttggacattccggttgtttctcgtttttttctataaacatccctgactgcttccttggattcctgaaaagggagttgctggggcaaagggggcgtgcatttttaaagtttatgaccctctctgctaattctccttccaaaaggttgtcctattttatgctccctctacttaagctaaccctaggtgagtattattatgttttaattatttcccaacatgacaggtaagaaaaacacattatcacattgttgaaatttgcatcttgtgattacttttactattcattggccattcatgcttttttttttttttttttggttgtctggtcatgtccttactcctaatagggtgttcatcttatttttcccttattgatttgccacagctctttatttggaatggttattaacctttcatcagccattacatatatagcaaatattttccccaattcatcatttgctttttttctatttgtttatggtgttttttgtgatgcttatgatggttttatacagtcaaataggttagtctttttttctgtggcttctgtctctggttttgtgcttagaaagtcctttcctacttgaaaatgagataaatgttcacctatgttggcttctagtctcttttatggcttcattttttccatttactatagaggttaagagtgtgggtactggagccagactgtctgggacaaacccagcgtcaccccaagccctatgtgtgatttttagccaggcacttaacctctccatacctccatttcctcatatgtactgcaatggttataatagtaccttcctcaggagtctttgtttagattaaaatttttaaccacagtaaatacttagcacaaggcctgacacacaataaacccaagatcagcattaggtgttaaaacttatatcttgaatggatctgggcattttagggtatatgatgatggtgacatttcaaactgggcagggaggggttgttgggataatggactgactattcactcaataactttatcttctccctaattatctcagacacatttgttaaaccatactccatggtcctccagtttgaaatgccacattcatcacaaattcagttctctccatatgtgggtccatgtccaagctttctattctgttctcttccccagtatctgttcttataccagggccacactgttttgctgattgttgctttgcaatacaattcaatacccagccatgggtgtccctggcaccttgcccttctttattcttgattatttcaggcagcatcagttgaaccagccagagaccagcaaatgttcttatttgaggcaatcctcctctcgcacacatgcactctggctctccatgcatgtgtccatttctctcaatgtctctcactatctcttgttctctcttgctcgctctttgtgtgtgtctctttgtctctatgtatccctatctctcagccagtcccctggatagaggggcaattgtcaacttgaagccctgcagacacctaatgacttaaccagacagcgtagaagggccctggcccttgtctactccacgcctctccgtgctcagtgtagaagggcaaattgaagaccagagatctcagggcctcaccgaaatgcagcggcagagttgaaatccaagcctagatctcaggactctaggtgggaccctggttctggctctctccccaactgcaggcctcagtttacccctcagcacccagaagggggaaggggaacctgggctaccattcccccttctgccttctcacacgttggaccccaacttcccacaggttggacgatccacgatcacagtgtggggcccagcctcacaagagctgggctaggtgaggccccggactccataggtcaggaggcctagttggccagagcgtggtgatgatggaggcatgtcagtcagtcaggctgtgtgtccccagagctggtgctggtccccgaaaaccttgattgtggggcccctctagagagtctgatgatgggctctgtattggcgaaggctgaggcttttccagctccccccatgaggcccagaccaaaggcacaccagcctcaacctcctcctccccctgttgccatctctggcggagtggccatgtatttgggaacgttgttccagagtggacagggagactgaggccctagggaggctggctctgtttccaggcctggtaggcaagaggccctatgaagcagcaagctgcctgactttcagatggttccaaggagtttggacaccagggacactggcctacacatactgagactttgggaccgtagaccccacagtctgtggttttgagattctaggatcctttaaatctaagaaatgctgttctatgattctgaggtcctggtgttatactatttgaagaccccaggggtcccagtatctgtggagcctgcctggcactctcagagcttcaaacctgggtcctctccacaacccaagaagggccaggtcttcagagctaggggcttgtcatagtggccagatggacatcacctaccacatccaccagcacccatgtcaccccacctgggccaagcctgctgcaggacagggcagccagttctcggaacgaaacctgtggggtggggtatctgccctcttctcttcctccgtggtgtcgatgaagcccggcgcatccggccgccatgacgtcaatggcggaaaaatctgggcaagtcgggggctgtgacaacagggcccagatgcagaccccgatatgaaaacataatctgtgtcccagaaacatcccccattcagcttctgagaaacccagtcagaaagggacgtcccaacagacagtgcaggaagccggctgcccagcccggccctctaggtcctctacccccagacagatcatctccatgtccctgtctgagaatgtatctatgctttgctgagtcaggccatcccacatgtgtttggggagaattcttagctctggccaagtgtccaggcagcttcagaagtgaccacaggccagccacatgggccaggccagagtggtggaaaacatccatttgcaccgaaatcggtattagtttgttctggctgctataacaaagtaccacaactgagtggcttcagcaacagaaattgatcatctcacagttctggaggccagagtccaagatcaaggtgttgccagggttggttccttctgggggccataagggagaagctgctccaggcctctcccccagcttctggtggttgctggcaatctttgttatttcttggcttgaaggagcatcaccccatctctggcttcattcattcactcaccttctcatctcaccagtgctctcccaggcccttgttcggagcctccacagacccacactcctgtttctcacgcagtaatgttctaagcccccaggagactaagaacttaatacctggattctcacactcatctccctcagcaccacagctctgacaaccacccccaggaggtgacagcaaagaaaggaaggagcaactgctcccccagaacccttctatactcccccgggctgctctcagcagctgtgtgcccaactcagtgctgtgaggtggaacggggagatggagacacacacacacacacaccagagagtttataaaatgtgcacacggaaacacttcctaaagaaagaagtggagttctcaagtcactatgggactacggaactcggcatctgagcatccccttctgtataatggggttggctgggcagtcccttccagctctggcttcctctcagaccaggattataggatcctgaaaagccagtgcttccctcagggagtggaaggttctggggctcagcagggggcccggagccattgtggagggctttcaaggtgaggacaatagaagagcaggtcttgcgtggcttggacagggaaagaggagaaggagtgggcatttgaggcagggggtgtagcatgagccaggcttgagggccagaaattggggtgaactctgatgggggctgggtagagaagcttctacaggccccagctcaagagaccccatctctcctcctctctgtcacttgccatgctggatccgtgcatgatcacactcctggactcgcctccttgccctgagatccagacccccgtattcagctgccccctcagctcctccactcacatatttaatgccagactcttcatgtctatctacacctgcacttttgcacccaatccaactccccgccatgtcccccatctcaggtaatgtcagctcggtccttccagctgctcaagctaaaacccatgtcactttgactctccctcttgcccactacatccaagctgctagcactgctcctgatccagcttcagattaagtctcagaatctacccacttctcgccttctccactgccaccagcccattctgtgccagcatcatcacttgccaggactgttacaatagcctcctcactagccccactcacagcagccagatgaatcttttgagtccatgcctagtcactggggcaaaataggactccgaggagaaagtccgagaccagctccggcaagatgagcaaacacagcctgtgcagggtgcagggagggctagaggcctgaggcttgaaacagctctcaagtggagggggaaacaaccattgccctcatagaggacacatccacaccagggctgtgctagcgtgggcaggcaagccaggtgctggacctctgcacgtggggcatgtgtgggtatgtacatgtacctgtgttcttggtgtgtgtgtgtgtgtgtgtgtgtgtgtgtgtctagagctggggtgcaactatggggcccctcgggacatgtcccagccaatgcctgctttgaccagaggagtgtccacgtggctcaggtggtcgagtatctcataccgccctagcacacgtgtgactcctttcccctattgtctacgcagcctgcccttggacaaggacccgatgcccaaccccaggcctggcaagccctcggccccttccttggcccttggcccatccccaggagcctcgcccagctggagggctgcacccaaagcctcagacctgctgggggcccggggcccagggggaaccttccagggccgagatcttcgaggcggggcccatgcctcctcttcttccttgaaccccatgccaccatcgcagctgcaggtgaggccctgggcccaggatggggcaggcagggtggggtacctggacctacaggtgccgacctttactgtggcactgggcgggaggggggctggctggggcacaggaagtggtttctgggtcccaggcaagtctgtgacttatgcagatgttgcagggccaagaaaatccccacctgccaggcctcagagattggaggctctccccgacctcccaatccctgtctcaggagaggaggaggccgtattgtagtcccatgagcatagctatgtgtccccatccccatgtgacaagagaagaggactggggccaagtaggtgaggtgacagggctgaggccagctctgcaacttattagctgtttgatctttaaaaagttactcgatctccatgagcctcagtttccatacgtgtaaaagggggatgatcatagcatctaccatgtgggcttgcagtgcagagtatttgaattagacacagaacagtgaggatcaggatggcctctcacccacctgcctttctgcccagctgcccacactgcccctagtcatggtggcaccctccggggcacggctgggccccttgccccacttacaggcactcctccaggacaggccacatttcatgcaccaggtatggacggtgaatgggcagggaggagggagcaggtgggagaactgtggggaggggccccgagtcaggctgaaccacagcccacatgtgccccccagctctcaacggtggatgcccacgcccggacccctgtgctgcaggtgcaccccctggagagcccagccatgatcagcctcacaccacccaccaccgccactggggtcttctccctcaaggcccggcctggcctcccacctggtaacacctcagcccgtaccccatggcttcacagaacccccaagtccccagatccttggctgtgagcagtgtaggctattctgaattgcagtactctgggggtcaaaggtgtcaggtctcagaggcttggaaactccaccctccaaaaaacgtcaggtgcagaaccttaaagatgcagaatgtcaaaatcacaaaaccacagagctttacaaagctagtcaaaatgtcagcacctgcgaatggccgtctttaagcttctctgccagaagcctgggactttggggacagcagagccccctgggagtcagggttttcgaggctcaggagggtgggaagctcaaaatgagaggccttgtgggccaagctccagagcccagcccacagcctccataggtgccctgtccccacccacagggatcaacgtggccagcctggaatgggtgtccagggagccggcactgctctgcaccttcccaaatcccagtgcacccaggaaggacaggtcagtggacagggctgggaaggatcctcgccctcctatcccctcccctgacaccctctgtccccccagcaccctttcggctgtgccccagagctcctacccactgctggcaaatggtgtctgcaagtggcccggatgtgagaaggtcttcgaagagccagaggacttcctcaagtgagtggcccaggcctgtgccagtctaccggccctggcttgtggggagaggtctagggtgcagatctcagctcaggcttcatcccaataagtagtaagatgcaagagctaaactctgagactgtgggttcaaatcccagctccatccctgactggctgtgtgaccttggacaaattacttagcttctctcgacctcagttttctcgtatgtataataagaaacgtttgtgctgttatttacccccattttacagacaaggagactgaggccaaagaggttaagtgtcttgatcaaaatctcccagttcctgagtgacagagctgggatttgaacccatgtagccaggctctagaatctgcactcctgctttgccctgctactcctcatgccaacatgccagccttattccactgttcccaaagttctagctcctctagatggctgctgctgcctcccctcagtccccccatatgtctctctctctctctctctctctctctctctctctctctctctctctctctctctttctctctctctcacacacacacacacacaaatacacaccacactacacacaacccttagcagcaaccccacatgtcctgtcctccttgcagccaggcctttgcacaggccgtccctccacccagaatgctttgcccactctcacctccctggcccattctcaactcaccacacttccaacattatctccagcactctggccaggctcaagtggtgagttcaggcctgacatgcagtaggtgctgaggggcatgtgttaagggaacgaggggtgtgagagggagactgaggtagagaggggaggggagctggggctcagaggagagaactcccagagggtctgggccctccccattcagagcattgagccagaccaggcctgtcgtggtcacctgcatggaatcttctccctacttaggcactgccaggcggaccatcttctggatgagaagggcagggcacaatgtctcctccagagagagatggtacagtctctggagcagcaggtaatgccagggcggtggagggtaagggatagggatagtgcgcaaaaccttctgtccaccatgtgccagaaaccaagttcacctgggacgagggctggtataaaggaaggaagaggagcgggcactcccagggaagaccgtagcctgggcaaagatgtggcagagaagggccaggctgaggcctcatgtttgtgccatttcacagctggtgctggagaaggagaagctgagtgccatgcaggcccacctggctgggaaaatggcactgaccaaggcttcatctgtggtgagcgaccccaggactggtggtggcagactcagactgctggggggcagggaggaggtctgcacggtgcagggaacctaacctcacattcaggtcctgagagctaggggcccctgtccccagctccaaacatgcccagacctggaaatctgtccccttctacttacaaaccctctgaccccggctgggcgtggtggctcacgcctgtaatcccagcactttgggaggccgaggcgggtggatcacgaggtcaggagttcaagaccagcctcgccaagatggtgaaaccctgtgtctactaaaagtacaaaaaattagccaggcgtggtggcaggtgtctgtagtcccaactacttgggaggctgaggcagagaattgcttgaacctgggaggcggagtttgcagtgagctgagatcataccactgcactccagcctaggcgacagatcaagactccgtctcaagaaaaaaaaaaaaaaaaaaccctctgactctaagatccccaaacactgtgatcctgagttgttaaagcaaatgcaaatagccagacttgccagatgcaggctgtgtgccagcaggaccagctatgtaacctgcagggccccttgttcagatttcaagatggcgaccacagagcattaaacaaagcacagggtgccacataaccacataggtcacacgcccatgaagccagccctggaggccaggcactgtttctgagcgctttgctggtggtaatttatttctcatgatgcgaatgtacagatgaggaatattgaggccaggggggtttaggtgactttcccaaggtcacagttgggtggtaaagagccctattcaaccccagttcatggtcccagcatcagtggccacatacgacatccgcacctgtgctctaataaatacggctcatgctgttttgtgggattccacctcagactggaatttagaagagggcgtccttgctttgaaaaacactgatttaaaaataaagtggagccaggcgcagtggctcatgcctgtaatcccagcactttgggaggctgaagcgggtggatcacatgaggtcaggagttcgagaccagcctggctaacatggtgaaaccccatctctaccaaaaatacaaaaattagctgggcgtagtgacgggcacctgtagtcccagctactcgggaggctgaggcagaagacttgcttgaatctgggaggtgggggttgcagtgagccgagattgcaccactgcactccagcctgggcgacagagcaagactcagtatcaaaaaaaataaaaaacataaaatagaaagtaaaaagtgggaagtttaagcctctgggtcaccagcctctccccctcacccaggcatcatccgacaagggctcctgctgcatcgtagctgctggcagccaaggccctgtcgtcccagcctggtctggcccccgggaggcccctgacagcctgtttgctgtccggaggcacctgtggggtagccatggaaacagcacattcccaggtaagaatggtccttgcactacacggtgcccccaagctcctaatcctgacaggctctgggtggagggtgcaaaggagctccatgctgccccttcccaccaccaccaccactgcagctgccgccactcagcctttgggaaaatgcatccgctcacaaaagcttcctttcgggatgtccgtggcctgaaagccccccatatggtctcgagtgtcgggcccctagccctgactcccttggggattggggccatgcctcacccactctggactccagctactatattcggccatcagaagggagggaccctgctaagtaattccaggagcacctcctttcctcccctgaccaaggaaaatcggggtggattcgcccgagctcacctatccactgctctccaccaggcctggcctgtgggcttagcagggatcagagaccttgactgtcatcctggctctgccatttaacctcttgcatcctttggtgtgcaagttactccgcttcttttcaacctcggggagaactattttggcagaagtggtgcaaagaataaatgatacaacttatgtcaggtgctcagcaaacagtacctgtgcccgtggacacgggtgttgacggtgagatctcaggcctgtagactcaccttgtagggggaggggacagggagctagctaggaggtcctgcatggggcttgattcatccccaccctctgacagagttcctccacaacatggactacttcaagttccacaacatgcgaccccctttcacctacgccacgctcatccgctgggtaagcagggcagctcggccccaaggaggaggaagacaaagatggggtgggggacctgcctcccaaactcctgtctccctctgagtgccctcagagtgggttcctccattcccaagccccagccccaaggatccccaagccgtgcctcaaatgtgacccctcatgctggcttcaccccaaacctgtccgcaaatccaaacctaaaccaccatccaggccagagcatgccaaattctgaccctaaacctacccctttccagatgtccacctcagccccatacctaaccctctcctggacccataaaatagcctaaagctaaccccatctctgcaccttgccctaaacgtaccccagctcttactctaactccttccccagcctttatgccaacccaaccccatctccttccctggccccaacgtaccccagtatgtcaatacacccccaactgggcaccattcccaacctttccttgtaacacccatttgatccttaacttcatcaccccatcccaactccttcatctcagcctccccaatgccttctcagaaccttcatcctagcgccacacctaaccccaaacctgaacctcacccctacatgataccagatattccccgactgtctctgaactgaaaccctgacctagccccatcctgactgatagcctcactgcaatcatcatcgctgactctgtaatcccattcctgaatccaaactgatcaaattccctgaccctcagcctcactccacaccgaaccccacaactaacctcatccttgccctgagcctaaccacctaaccatgtccctgacacgtaagatactcgataattcaaaccatctctggcttctgacctaaagccaagtcatcccatccctcacccctagaccccccacctgagtccaccccagcctgactcttaacccaccccttccctgacccttaagttggcctggccctttaccccttccaaatccttgaccccacttctgacccttcaccttccccaaccctgaaatgtcacctccacagagaaccccaactccaactccatcccagacctttcacctcacttcagccctagccctgaacaagaccccactcccaacctcagtcctgatcccttacctaatcccagaacaaccatacccacacccatctaaccctgcccaacccgacacttcaccccttttctaaccccatctttgaccccatgcttcaccccacatctagtcctgtccctgattacctgcccctacaattccgcccccatgtcagatggctcggggtaggtcatagcccctctaaaccccaagtttggggaatgtgccccttaccccaccccccaacttccaggccatcctggaggctccagagaagcagcggacactcaatgagatctaccactggttcacacgcatgtttgccttcttcagaaaccatcctgccacctggaaggtgagctcctctgaggtggcggtgactgggatggcctcaagtgccatcgcagctcaaagtgggcaggcctgggtctgggctcataggcacattggggaggaacgggatgtgggttgttggtggtggctgctggcctcagaggttgacgcccacctgctccctgtccccggccttccacagaacgccatccgccacaacctgagtctgcacaagtgctttgtgcgggtggagagcgagaagggggctgtgtggaccgtggatgagctggagttccgcaagaaacggagccagaggcccagcaggtgttccaaccctacacctggcccctgacctcaagatcaaggaaaggaggatggacgaacaggggccaaactggtgggaggcagaggtggtgggggcagggatgataggccctggatgtgcccacagggaccaagaagtgaggtttccactgtcttgcctgccagggcccctgttcccccgctggcagccaccccctcccccatcatatcctttgccccaaggctgctcagaggggccccggtcctggccccagcccccacctccgccccagacacaccccccagtcgagccctgcagccaaacagagccttcacaaccagccacacagagcctgcctcagctgctcgcacagattacttcagggctggaaaagtcacacagacacacaaaatgtcacaatcctgtccctcactcaacacaaaccccaaaacacagagagcctgcctcagtacactcaaacaacctcaaagctgcatcatcacacaatcacacacaagcacagccctgacaacccacacaccccaaggcacgcacccacagccagcctcagggcccacaggggcactgtcaacacaggggtgtgcccagaggcctacacagaagcagcgtcagtaccctcaggatctgaggtcccaacacgtgctcgctcacacacacggcctgttagaattcacctgtgtatctcacgcatatgcacacgcacagccccccagtgggtctcttgagtcccgtgcagacacacacagccacacacactgccttgccaaaaataccccgtgtctcccctgccactcacctcactcccattccctgagccctgatccatgcctcagcttagactgcagaggaactactcatttatttgggatccaaggcccccaacccacagtaccgtccccaataaactgcagccgagctccccaca

SEQ ID NO: 940 - RNA, 21 nt, synthetic construct
  source 1..21: mol_type = other RNA
  modified_base 18: mod_base = OTHER; note = Nucleotide with phosphorothioate linkage
  modified_base 19: mod_base = OTHER; note = 2'-O-methyl modified nucleotide with phosphorothioate linkage
  modified_base 20: mod_base = OTHER; note = 2'-O-methyl modified nucleotide with phosphorothioate linkage
  modified_base 21: mod_base = OTHER; note = 2'-O-methyl modified nucleotide
gtcatagttccattaaagcca

SEQ ID NO: 941 - RNA, 85 nt, synthetic construct; identical to SEQ ID NO: 547
  source 1..85: mol_type = other RNA
  modified_base 1: mod_base = OTHER; note = 2'-O-methyl modified nucleotide with phosphorothioate linkage
  modified_base 2: mod_base = OTHER; note = 2'-O-methyl modified nucleotide with phosphorothioate linkage
  modified_base 3: mod_base = OTHER; note = 2'-O-methyl modified nucleotide with phosphorothioate linkage
  modified_base 82: mod_base = OTHER; note = Nucleotide with phosphorothioate linkage
  modified_base 83: mod_base = OTHER; note = 2'-O-methyl modified nucleotide with phosphorothioate linkage
  modified_base 84: mod_base = OTHER; note = 2'-O-methyl modified nucleotide with phosphorothioate linkage
  modified_base 85: mod_base = OTHER; note = 2'-O-methyl modified nucleotide

SEQ ID NO: 942 - RNA, 16 nt, synthetic construct
  source 1..16: mol_type = other RNA
  modified_base 13: mod_base = OTHER; note = Nucleotide with phosphorothioate linkage
  modified_base 14: mod_base = OTHER; note = 2'-O-methyl modified nucleotide with phosphorothioate linkage
  modified_base 15: mod_base = OTHER; note = 2'-O-methyl modified nucleotide with phosphorothioate linkage
  modified_base 16: mod_base = OTHER; note = 2'-O-methyl modified nucleotide
gtcatagttccattaa

SEQ ID NO: 943 - RNA, 15 nt, synthetic construct
  source 1..15: mol_type = other RNA
  modified_base 12: mod_base = OTHER; note = Nucleotide with phosphorothioate linkage
  modified_base 13: mod_base = OTHER; note = 2'-O-methyl modified nucleotide with phosphorothioate linkage
  modified_base 14: mod_base = OTHER; note = 2'-O-methyl modified nucleotide with phosphorothioate linkage
  modified_base 15: mod_base = OTHER; note = 2'-O-methyl modified nucleotide
gtcatagttccatta

SEQ ID NO: 944 - RNA, 14 nt, synthetic construct
  source 1..14: mol_type = other RNA
  modified_base 11: mod_base = OTHER; note = Nucleotide with phosphorothioate linkage
  modified_base 12: mod_base = OTHER; note = 2'-O-methyl modified nucleotide with phosphorothioate linkage
  modified_base 13: mod_base = OTHER; note = 2'-O-methyl modified nucleotide with phosphorothioate linkage
  modified_base 14: mod_base = OTHER; note = 2'-O-methyl modified nucleotide
gtcatagttccatt

SEQ ID NO: 945 - RNA, 13 nt, synthetic construct
  source 1..13: mol_type = other RNA
  modified_base 10: mod_base = OTHER; note = Nucleotide with phosphorothioate linkage
  modified_base 11: mod_base = OTHER; note = 2'-O-methyl modified nucleotide with phosphorothioate linkage
  modified_base 12: mod_base = OTHER; note = 2'-O-methyl modified nucleotide with phosphorothioate linkage
  modified_base 13: mod_base = OTHER; note = 2'-O-methyl modified nucleotide
gtcatagttccat

SEQ ID NO: 946 - RNA, 74 nt, synthetic construct; identical to SEQ ID NO: 553
  source 1..74: mol_type = other RNA
  modified_base 1: mod_base = OTHER; note = 2'-O-methyl modified nucleotide with phosphorothioate linkage
  modified_base 2: mod_base = OTHER; note = 2'-O-methyl modified nucleotide with phosphorothioate linkage
  modified_base 3: mod_base = OTHER; note = 2'-O-methyl modified nucleotide with phosphorothioate linkage
  modified_base 71: mod_base = OTHER; note = Nucleotide with phosphorothioate linkage
  modified_base 72: mod_base = OTHER; note = 2'-O-methyl modified nucleotide with phosphorothioate linkage
  modified_base 73: mod_base = OTHER; note = 2'-O-methyl modified nucleotide with phosphorothioate linkage
  modified_base 74: mod_base = OTHER; note = 2'-O-methyl modified nucleotide

SEQ ID NO: 947 - RNA, 79 nt, synthetic construct; identical to SEQ ID NO: 554
  source 1..79: mol_type = other RNA
  modified_base 1: mod_base = OTHER; note = 2'-O-methyl modified nucleotide with phosphorothioate linkage
  modified_base 2: mod_base = OTHER; note = 2'-O-methyl modified nucleotide with phosphorothioate linkage
  modified_base 3: mod_base = OTHER; note = 2'-O-methyl modified nucleotide with phosphorothioate linkage
  modified_base 76: mod_base = OTHER; note = Nucleotide with phosphorothioate linkage
  modified_base 77: mod_base = OTHER; note = 2'-O-methyl modified nucleotide with phosphorothioate linkage
  modified_base 78: mod_base = OTHER; note = 2'-O-methyl modified nucleotide with phosphorothioate linkage
  modified_base 79: mod_base = OTHER; note = 2'-O-methyl modified nucleotide

SEQ ID NO: 948 - RNA, 73 nt, synthetic construct; identical to SEQ ID NO: 555
  source 1..73: mol_type = other RNA
  modified_base 1: mod_base = OTHER; note = 2'-O-methyl modified nucleotide with phosphorothioate linkage
  modified_base 2: mod_base = OTHER; note = 2'-O-methyl modified nucleotide with phosphorothioate linkage
  modified_base 3: mod_base = OTHER; note = 2'-O-methyl modified nucleotide with phosphorothioate linkage
  modified_base 70: mod_base = OTHER; note = Nucleotide with phosphorothioate linkage
  modified_base 71: mod_base = OTHER; note = 2'-O-methyl modified nucleotide with phosphorothioate linkage
  modified_base 72: mod_base = OTHER; note = 2'-O-methyl modified nucleotide with phosphorothioate linkage
  modified_base 73: mod_base = OTHER; note = 2'-O-methyl modified nucleotide

SEQ ID NO: 949 - RNA, 71 nt, synthetic construct; identical to SEQ ID NO: 556
  source 1..71: mol_type = other RNA
  modified_base 1: mod_base = OTHER; note = 2'-O-methyl modified nucleotide with phosphorothioate linkage
  modified_base 2: mod_base = OTHER; note = 2'-O-methyl modified nucleotide with phosphorothioate linkage
  modified_base 3: mod_base = OTHER; note = 2'-O-methyl modified nucleotide with phosphorothioate linkage
  modified_base 68: mod_base = OTHER; note = Nucleotide with phosphorothioate linkage
  modified_base 69: mod_base = OTHER; note = 2'-O-methyl modified nucleotide with phosphorothioate linkage
  modified_base 70: mod_base = OTHER; note = 2'-O-methyl modified nucleotide with phosphorothioate linkage
  modified_base 71: mod_base = OTHER; note = 2'-O-methyl modified nucleotide

SEQ ID NO: 950 - RNA, 78 nt, synthetic construct; identical to SEQ ID NO: 557
  source 1..78: mol_type = other RNA
  modified_base 1: mod_base = OTHER; note = 2'-O-methyl modified nucleotide with phosphorothioate linkage
  modified_base 2: mod_base = OTHER; note = 2'-O-methyl modified nucleotide with phosphorothioate linkage
  modified_base 3: mod_base = OTHER; note = 2'-O-methyl modified nucleotide with phosphorothioate linkage
  modified_base 75: mod_base = OTHER; note = Nucleotide with phosphorothioate linkage
  modified_base 76: mod_base = OTHER; note = 2'-O-methyl modified nucleotide with phosphorothioate linkage
  modified_base 77: mod_base = OTHER; note = 2'-O-methyl modified nucleotide with phosphorothioate linkage
  modified_base 78: mod_base = OTHER; note = 2'-O-methyl modified nucleotide

SEQ ID NO: 951 - RNA, 72 nt, synthetic construct; identical to SEQ ID NO: 558
  source 1..72: mol_type = other RNA
  modified_base 1: mod_base = OTHER; note = 2'-O-methyl modified nucleotide with phosphorothioate linkage
  modified_base 2: mod_base = OTHER; note = 2'-O-methyl modified nucleotide with phosphorothioate linkage
  modified_base 3: mod_base = OTHER; note = 2'-O-methyl modified nucleotide with phosphorothioate linkage
  modified_base 69: mod_base = OTHER; note = Nucleotide with phosphorothioate linkage
  modified_base 70: mod_base = OTHER; note = 2'-O-methyl modified nucleotide with phosphorothioate linkage
  modified_base 71: mod_base = OTHER; note = 2'-O-methyl modified nucleotide with phosphorothioate linkage
  modified_base 72: mod_base = OTHER; note = 2'-O-methyl modified nucleotide

SEQ ID NO: 952 - RNA, 70 nt, synthetic construct; identical to SEQ ID NO: 559
  source 1..70: mol_type = other RNA
  modified_base 1: mod_base = OTHER; note = 2'-O-methyl modified nucleotide with phosphorothioate linkage
  modified_base 2: mod_base = OTHER; note = 2'-O-methyl modified nucleotide with phosphorothioate linkage
  modified_base 3: mod_base = OTHER; note = 2'-O-methyl modified nucleotide with phosphorothioate linkage
  modified_base 67: mod_base = OTHER; note = Nucleotide with phosphorothioate linkage
  modified_base 68: mod_base = OTHER; note = 2'-O-methyl modified nucleotide with phosphorothioate linkage
  modified_base 69: mod_base = OTHER; note = 2'-O-methyl modified nucleotide with phosphorothioate linkage
  modified_base 70: mod_base = OTHER; note = 2'-O-methyl modified nucleotide

SEQ ID NO: 953 - RNA, 77 nt, synthetic construct; identical to SEQ ID NO: 560
  source 1..77: mol_type = other RNA
  modified_base 1: mod_base = OTHER; note = 2'-O-methyl modified nucleotide with phosphorothioate linkage
  modified_base 2: mod_base = OTHER; note = 2'-O-methyl modified nucleotide with phosphorothioate linkage
  modified_base 3: mod_base = OTHER; note = 2'-O-methyl modified nucleotide with phosphorothioate linkage
  modified_base 74: mod_base = OTHER; note = Nucleotide with phosphorothioate linkage
  modified_base 75: mod_base = OTHER; note = 2'-O-methyl modified nucleotide with phosphorothioate linkage
  modified_base 76: mod_base = OTHER; note = 2'-O-methyl modified nucleotide with phosphorothioate linkage
  modified_base 77: mod_base = OTHER; note = 2'-O-methyl modified nucleotide

SEQ ID NO: 954 - RNA, 71 nt, synthetic construct; identical to SEQ ID NO: 561
  source 1..71: mol_type = other RNA
  modified_base 1: mod_base = OTHER; note = 2'-O-methyl modified nucleotide with phosphorothioate linkage
  modified_base 2: mod_base = OTHER; note = 2'-O-methyl modified nucleotide with phosphorothioate linkage
  modified_base 3: mod_base = OTHER; note = 2'-O-methyl modified nucleotide with phosphorothioate linkage
  modified_base 68: mod_base = OTHER; note = Nucleotide with phosphorothioate linkage
  modified_base 69: mod_base = OTHER; note = 2'-O-methyl modified nucleotide with phosphorothioate linkage
  modified_base 70: mod_base = OTHER; note = 2'-O-methyl modified nucleotide with phosphorothioate linkage
  modified_base 71: mod_base = OTHER; note = 2'-O-methyl modified nucleotide

SEQ ID NO: 955 - RNA, 69 nt, synthetic construct; identical to SEQ ID NO: 562
  source 1..69: mol_type = other RNA
  modified_base 1: mod_base = OTHER; note = 2'-O-methyl modified nucleotide with phosphorothioate linkage
  modified_base 2: mod_base = OTHER; note = 2'-O-methyl modified nucleotide with phosphorothioate linkage
  modified_base 3: mod_base = OTHER; note = 2'-O-methyl modified nucleotide with phosphorothioate linkage
  modified_base 66: mod_base = OTHER; note = Nucleotide with phosphorothioate linkage
  modified_base 67: mod_base = OTHER; note = 2'-O-methyl modified nucleotide with phosphorothioate linkage
  modified_base 68: mod_base = OTHER; note = 2'-O-methyl modified nucleotide with phosphorothioate linkage
  modified_base 69: mod_base = OTHER; note = 2'-O-methyl modified nucleotide

SEQ ID NO: 956 - RNA, 94 nt, synthetic construct; identical to SEQ ID NO: 563
  source 1..94: mol_type = other RNA
  modified_base 91: mod_base = OTHER; note = Nucleotide with phosphorothioate linkage
  modified_base 92: mod_base = OTHER; note = 2'-O-methyl modified nucleotide with phosphorothioate linkage
  modified_base 93: mod_base = OTHER; note = 2'-O-methyl modified nucleotide with phosphorothioate linkage
  modified_base 94: mod_base = OTHER; note = 2'-O-methyl modified nucleotide

SEQ ID NO: 957 - RNA, 98 nt, synthetic construct; identical to SEQ ID NO: 564
  source 1..98: mol_type = other RNA
  modified_base 95: mod_base = OTHER; note = Nucleotide with phosphorothioate linkage
  modified_base 96: mod_base = OTHER; note = 2'-O-methyl modified nucleotide with phosphorothioate linkage
  modified_base 97: mod_base = OTHER; note = 2'-O-methyl modified nucleotide with phosphorothioate linkage
  modified_base 98: mod_base = OTHER; note = 2'-O-methyl modified nucleotide

SEQ ID NO: 958 - RNA, 92 nt, synthetic construct; identical to SEQ ID NO: 565
  source 1..92: mol_type = other RNA
  modified_base 89: mod_base = OTHER; note = Nucleotide with phosphorothioate linkage
  modified_base 90: mod_base = OTHER; note = 2'-O-methyl modified nucleotide with phosphorothioate linkage
  modified_base 91: mod_base = OTHER; note = 2'-O-methyl modified nucleotide with phosphorothioate linkage
  modified_base 92: mod_base = OTHER; note = 2'-O-methyl modified nucleotide

SEQ ID NO: 959 - RNA, 90 nt, synthetic construct; identical to SEQ ID NO: 566
  source 1..90: mol_type = other RNA
  modified_base 87: mod_base = OTHER; note = Nucleotide with phosphorothioate linkage
  modified_base 88: mod_base = OTHER; note = 2'-O-methyl modified nucleotide with phosphorothioate linkage
  modified_base 89: mod_base = OTHER; note = 2'-O-methyl modified nucleotide with phosphorothioate linkage
  modified_base 90: mod_base = OTHER; note = 2'-O-methyl modified nucleotide

SEQ ID NO: 960 - RNA, 96 nt, synthetic construct; identical to SEQ ID NO: 567
  source 1..96: mol_type = other RNA
  modified_base 93: mod_base = OTHER; note = Nucleotide with phosphorothioate linkage
  modified_base 94: mod_base = OTHER; note = 2'-O-methyl modified nucleotide with phosphorothioate linkage
  modified_base 95: mod_base = OTHER; note = 2'-O-methyl modified nucleotide with phosphorothioate linkage
  modified_base 96: mod_base = OTHER; note = 2'-O-methyl modified nucleotide

SEQ ID NO: 961 - RNA, 90 nt, synthetic construct; identical to SEQ ID NO: 568
  source 1..90: mol_type = other RNA
  modified_base 87: mod_base = OTHER; note = Nucleotide with phosphorothioate linkage
  modified_base 88: mod_base = OTHER; note = 2'-O-methyl modified nucleotide with phosphorothioate linkage
  modified_base 89: mod_base = OTHER; note = 2'-O-methyl modified nucleotide with phosphorothioate linkage
  modified_base 90: mod_base = OTHER; note = 2'-O-methyl modified nucleotide

SEQ ID NO: 962 - RNA, 88 nt, synthetic construct; identical to SEQ ID NO: 569
  source 1..88: mol_type = other RNA
  modified_base 85: mod_base = OTHER; note = Nucleotide with phosphorothioate linkage
  modified_base 86: mod_base = OTHER; note = 2'-O-methyl modified nucleotide with phosphorothioate linkage
  modified_base 87: mod_base = OTHER; note = 2'-O-methyl modified nucleotide with phosphorothioate linkage
  modified_base 88: mod_base = OTHER; note = 2'-O-methyl modified nucleotide

SEQ ID NO: 963 - RNA, 94 nt, synthetic construct; identical to SEQ ID NO: 570
  source 1..94: mol_type = other RNA
  modified_base 91: mod_base = OTHER; note = Nucleotide with phosphorothioate linkage
  modified_base 92: mod_base = OTHER; note = 2'-O-methyl modified nucleotide with phosphorothioate linkage
  modified_base 93: mod_base = OTHER; note = 2'-O-methyl modified nucleotide with phosphorothioate linkage
  modified_base 94: mod_base = OTHER; note = 2'-O-methyl modified nucleotide

SEQ ID NO: 964 - RNA, 88 nt, synthetic construct; identical to SEQ ID NO: 571
  source 1..88: mol_type = other RNA
  modified_base 85: mod_base = OTHER; note = Nucleotide with phosphorothioate linkage
  modified_base 86: mod_base = OTHER; note = 2'-O-methyl modified nucleotide with phosphorothioate linkage
  modified_base 87: mod_base = OTHER; note = 2'-O-methyl modified nucleotide with phosphorothioate linkage
  modified_base 88: mod_base = OTHER; note = 2'-O-methyl modified nucleotide

SEQ ID NO: 965 - RNA, 86 nt, synthetic construct; identical to SEQ ID NO: 572
  source 1..86: mol_type = other RNA
  modified_base 83: mod_base = OTHER; note = Nucleotide with phosphorothioate linkage
  modified_base 84: mod_base = OTHER; note = 2'-O-methyl modified nucleotide with phosphorothioate linkage
  modified_base 85: mod_base = OTHER; note = 2'-O-methyl modified nucleotide with phosphorothioate linkage
  modified_base 86: mod_base = OTHER; note = 2'-O-methyl modified nucleotide

SEQ ID NO: 966 - RNA, 110 nt, synthetic construct; identical to SEQ ID NO: 573
  source 1..110: mol_type = other RNA
  modified_base 107: mod_base = OTHER; note = Nucleotide with phosphorothioate linkage
  modified_base 108: mod_base = OTHER; note = 2'-O-methyl modified nucleotide with phosphorothioate linkage
  modified_base 109: mod_base = OTHER; note = 2'-O-methyl modified nucleotide with phosphorothioate linkage
  modified_base 110: mod_base = OTHER; note = 2'-O-methyl modified nucleotide

SEQ ID NO: 967 - RNA, 39 nt, synthetic construct; identical to SEQ ID NO: 574
  source 1..39: mol_type = other RNA
  modified_base 1: mod_base = OTHER; note = 2'-O-methyl modified nucleotide with phosphorothioate linkage
  modified_base 2: mod_base = OTHER; note = 2'-O-methyl modified nucleotide with phosphorothioate linkage
  modified_base 3: mod_base = OTHER; note = 2'-O-methyl modified nucleotide with phosphorothioate linkage
  modified_base 36: mod_base = OTHER; note = Nucleotide with phosphorothioate linkage
  modified_base 37: mod_base = OTHER; note = 2'-O-methyl modified nucleotide with phosphorothioate linkage
  modified_base 38: mod_base = OTHER; note = 2'-O-methyl modified nucleotide with phosphorothioate linkage
  modified_base 39: mod_base = OTHER; note = 2'-O-methyl modified nucleotide

SEQ ID NO: 968 - RNA, 39 nt, synthetic construct; identical to SEQ ID NO: 575
  source 1..39: mol_type = other RNA
  modified_base 1: mod_base = OTHER; note = 2'-O-methyl modified nucleotide with phosphorothioate linkage
  modified_base 2: mod_base = OTHER; note = 2'-O-methyl modified nucleotide with phosphorothioate linkage
  modified_base 3: mod_base = OTHER; note = 2'-O-methyl modified nucleotide with phosphorothioate linkage
  modified_base 36: mod_base = OTHER; note = Nucleotide with phosphorothioate linkage
  modified_base 37: mod_base = OTHER; note = 2'-O-methyl modified nucleotide with phosphorothioate linkage
  modified_base 38: mod_base = OTHER; note = 2'-O-methyl modified nucleotide with phosphorothioate linkage
  modified_base 39: mod_base = OTHER; note = 2'-O-methyl modified nucleotide

SEQ ID NO: 969 - RNA, 39 nt, synthetic construct; identical to SEQ ID NO: 576
  source 1..39: mol_type = other RNA
  modified_base 1: mod_base = OTHER; note = 2'-O-methyl modified nucleotide with phosphorothioate linkage
  modified_base 2: mod_base = OTHER; note = 2'-O-methyl modified nucleotide with phosphorothioate linkage
  modified_base 3: mod_base = OTHER; note = 2'-O-methyl modified nucleotide with phosphorothioate linkage
  modified_base 36: mod_base = OTHER; note = Nucleotide with phosphorothioate linkage
  modified_base 37: mod_base = OTHER; note = 2'-O-methyl modified nucleotide with phosphorothioate linkage
  modified_base 38: mod_base = OTHER; note = 2'-O-methyl modified nucleotide with phosphorothioate linkage
  modified_base 39: mod_base = OTHER; note = 2'-O-methyl modified nucleotide

SEQ ID NO: 970 - RNA, 38 nt, synthetic construct; identical to SEQ ID NO: 577
  source 1..38: mol_type = other RNA
  modified_base 1: mod_base = OTHER; note = 2'-O-methyl modified nucleotide with phosphorothioate linkage
  modified_base 2: mod_base = OTHER; note = 2'-O-methyl modified nucleotide with phosphorothioate linkage
  modified_base 3: mod_base = OTHER; note = 2'-O-methyl modified nucleotide with phosphorothioate linkage
  modified_base 35: mod_base = OTHER; note = Nucleotide with phosphorothioate linkage
  modified_base 36: mod_base = OTHER; note = 2'-O-methyl modified nucleotide with phosphorothioate linkage
  modified_base 37: mod_base = OTHER; note = 2'-O-methyl modified nucleotide with phosphorothioate linkage
  modified_base 38: mod_base = OTHER; note = 2'-O-methyl modified nucleotide

SEQ ID NO: 971 - RNA, 39 nt, synthetic construct; identical to SEQ ID NO: 578
  source 1..39: mol_type = other RNA
  modified_base 1: mod_base = OTHER; note = 2'-O-methyl modified nucleotide with phosphorothioate linkage
  modified_base 2: mod_base = OTHER; note = 2'-O-methyl modified nucleotide with phosphorothioate linkage
  modified_base 3: mod_base = OTHER; note = 2'-O-methyl modified nucleotide with phosphorothioate linkage
  modified_base 36: mod_base = OTHER; note = Nucleotide with phosphorothioate linkage
  modified_base 37: mod_base = OTHER; note = 2'-O-methyl modified nucleotide with phosphorothioate linkage
  modified_base 38: mod_base = OTHER; note = 2'-O-methyl modified nucleotide with phosphorothioate linkage
  modified_base 39: mod_base = OTHER; note = 2'-O-methyl modified nucleotide

SEQ ID NO: 972 - RNA, 38 nt, synthetic construct; identical to SEQ ID NO: 579
  source 1..38: mol_type = other RNA
  modified_base 1: mod_base = OTHER; note = 2'-O-methyl modified nucleotide with phosphorothioate linkage
  modified_base 2: mod_base = OTHER; note = 2'-O-methyl modified nucleotide with phosphorothioate linkage
  modified_base 3: mod_base = OTHER; note = 2'-O-methyl modified nucleotide with phosphorothioate linkage
  modified_base 35: mod_base = OTHER; note = Nucleotide with phosphorothioate linkage
  modified_base 36: mod_base = OTHER; note = 2'-O-methyl modified nucleotide with phosphorothioate linkage
  modified_base 37: mod_base = OTHER; note = 2'-O-methyl modified nucleotide with phosphorothioate linkage
  modified_base 38: mod_base = OTHER; note = 2'-O-methyl modified nucleotide

SEQ ID NO: 973 - RNA, 41 nt, synthetic construct; identical to SEQ ID NO: 580
  source 1..41: mol_type = other RNA
  modified_base 1: mod_base = OTHER; note = 2'-O-methyl modified nucleotide with phosphorothioate linkage
  modified_base 2: mod_base = OTHER; note = 2'-O-methyl modified nucleotide with phosphorothioate linkage
  modified_base 3: mod_base = OTHER; note = 2'-O-methyl modified nucleotide with phosphorothioate linkage
  modified_base 38: mod_base = OTHER; note = Nucleotide with phosphorothioate linkage
  modified_base 39: mod_base = OTHER; note = 2'-O-methyl modified nucleotide with phosphorothioate linkage
  modified_base 40: mod_base = OTHER; note = 2'-O-methyl modified nucleotide with phosphorothioate linkage
  modified_base 41: mod_base = OTHER; note = 2'-O-methyl modified nucleotide

SEQ ID NO: 974 - RNA, 41 nt, synthetic construct; identical to SEQ ID NO: 581
  source 1..41: mol_type = other RNA
  modified_base 1: mod_base = OTHER; note = 2'-O-methyl modified nucleotide with phosphorothioate linkage
  modified_base 2: mod_base = OTHER; note = 2'-O-methyl modified nucleotide with phosphorothioate linkage
  modified_base 3: mod_base = OTHER; note = 2'-O-methyl modified nucleotide with phosphorothioate linkage
  modified_base 38: mod_base = OTHER; note = Nucleotide with phosphorothioate linkage
  modified_base 39: mod_base = OTHER; note = 2'-O-methyl modified nucleotide with phosphorothioate linkage
  modified_base 40: mod_base = OTHER; note = 2'-O-methyl modified nucleotide with phosphorothioate linkage
  modified_base 41: mod_base = OTHER; note = 2'-O-methyl modified nucleotide

SEQ ID NO: 975 - RNA, 41 nt, synthetic construct; identical to SEQ ID NO: 582
  source 1..41: mol_type = other RNA
  modified_base 1: mod_base = OTHER; note = 2'-O-methyl modified nucleotide with phosphorothioate linkage
  modified_base 2: mod_base = OTHER; note = 2'-O-methyl modified nucleotide with phosphorothioate linkage
  modified_base 3: mod_base = OTHER; note = 2'-O-methyl modified nucleotide with phosphorothioate linkage
  modified_base 38: mod_base = OTHER; note = Nucleotide with phosphorothioate linkage
  modified_base 39: mod_base = OTHER; note = 2'-O-methyl modified nucleotide with phosphorothioate linkage
  modified_base 40: mod_base = OTHER; note = 2'-O-methyl modified nucleotide with phosphorothioate linkage
  modified_base 41: mod_base = OTHER; note = 2'-O-methyl modified nucleotide

SEQ ID NO: 976 - RNA, 41 nt, synthetic construct; identical to SEQ ID NO: 583
  source 1..41: mol_type = other RNA
  modified_base 1: mod_base = OTHER; note = 2'-O-methyl modified nucleotide with phosphorothioate linkage
  modified_base 2: mod_base = OTHER; note = 2'-O-methyl modified nucleotide with phosphorothioate linkage
  modified_base 3: mod_base = OTHER; note = 2'-O-methyl modified nucleotide with phosphorothioate linkage
  modified_base 38: mod_base = OTHER; note = Nucleotide with phosphorothioate linkage
  modified_base 39: mod_base = OTHER; note = 2'-O-methyl modified nucleotide with phosphorothioate linkage
  modified_base 40: mod_base = OTHER; note = 2'-O-methyl modified nucleotide with phosphorothioate linkage
  modified_base 41: mod_base = OTHER; note = 2'-O-methyl modified nucleotide

SEQ ID NO: 977 - RNA, 41 nt, synthetic construct; identical to SEQ ID NO: 584
  source 1..41: mol_type = other RNA
  modified_base 1: mod_base = OTHER; note = 2'-O-methyl modified nucleotide with phosphorothioate linkage
  modified_base 2: mod_base = OTHER; note = 2'-O-methyl modified nucleotide with phosphorothioate linkage
  modified_base 3: mod_base = OTHER; note = 2'-O-methyl modified nucleotide with phosphorothioate linkage
  modified_base 38: mod_base = OTHER; note = Nucleotide with phosphorothioate linkage
  modified_base 39: mod_base = OTHER; note = 2'-O-methyl modified nucleotide with phosphorothioate linkage
  modified_base 40: mod_base = OTHER; note = 2'-O-methyl modified nucleotide with phosphorothioate linkage
  modified_base 41: mod_base = OTHER; note = 2'-O-methyl modified nucleotide

SEQ ID NO: 978 - RNA, 41 nt, synthetic construct; identical to SEQ ID NO: 585
  source 1..41: mol_type = other RNA
  modified_base 1: mod_base = OTHER; note = 2'-O-methyl modified nucleotide with phosphorothioate linkage
  modified_base 2: mod_base = OTHER; note = 2'-O-methyl modified nucleotide with phosphorothioate linkage
  modified_base 3: mod_base = OTHER; note = 2'-O-methyl modified nucleotide with phosphorothioate linkage
  modified_base 38: mod_base = OTHER; note = Nucleotide with phosphorothioate linkage
  modified_base 39: mod_base = OTHER; note = 2'-O-methyl modified nucleotide with phosphorothioate linkage
  modified_base 40: mod_base = OTHER; note = 2'-O-methyl modified nucleotide with phosphorothioate linkage
  modified_base 41: mod_base = OTHER; note = 2'-O-methyl modified nucleotide

SEQ ID NO: 979 - RNA, 41 nt, synthetic construct; identical to SEQ ID NO: 586
  source 1..41: mol_type = other RNA
  modified_base 1: mod_base = OTHER; note = 2'-O-methyl modified nucleotide with phosphorothioate linkage
  modified_base 2: mod_base = OTHER; note = 2'-O-methyl modified nucleotide with phosphorothioate linkage
  modified_base 3: mod_base = OTHER; note = 2'-O-methyl modified nucleotide with phosphorothioate linkage
  modified_base 38: mod_base = OTHER; note = Nucleotide with phosphorothioate linkage
  modified_base 39: mod_base = OTHER; note = 2'-O-methyl modified nucleotide with phosphorothioate linkage
  modified_base 40: mod_base = OTHER; note = 2'-O-methyl modified nucleotide with phosphorothioate linkage
  modified_base 41: mod_base = OTHER; note = 2'-O-methyl modified nucleotide

SEQ ID NO: 980 - RNA, 41 nt, synthetic construct; identical to SEQ ID NO: 587
  source 1..41: mol_type = other RNA
  modified_base 1: mod_base = OTHER; note = 2'-O-methyl modified nucleotide with phosphorothioate linkage
  modified_base 2: mod_base = OTHER; note = 2'-O-methyl modified nucleotide with phosphorothioate linkage
  modified_base 3: mod_base = OTHER; note = 2'-O-methyl modified nucleotide with phosphorothioate linkage
  modified_base 38: mod_base = OTHER; note = Nucleotide with phosphorothioate linkage
  modified_base 39: mod_base = OTHER; note = 2'-O-methyl modified nucleotide with phosphorothioate linkage
  modified_base 40: mod_base = OTHER; note = 2'-O-methyl modified nucleotide with phosphorothioate linkage
  modified_base 41: mod_base = OTHER; note = 2'-O-methyl modified nucleotide

SEQ ID NO: 981 - RNA, 41 nt, synthetic construct; identical to SEQ ID NO: 588
  source 1..41: mol_type = other RNA
  modified_base 1: mod_base = OTHER; note = 2'-O-methyl modified nucleotide with phosphorothioate linkage
  modified_base 2: mod_base = OTHER; note = 2'-O-methyl modified nucleotide with phosphorothioate linkage
  modified_base 3: mod_base = OTHER; note = 2'-O-methyl modified nucleotide with phosphorothioate linkage
  modified_base 38: mod_base = OTHER; note = Nucleotide with phosphorothioate linkage
  modified_base 39: mod_base = OTHER; note = 2'-O-methyl modified nucleotide with phosphorothioate linkage
  modified_base 40: mod_base = OTHER; note = 2'-O-methyl modified nucleotide with phosphorothioate linkage
  modified_base 41: mod_base = OTHER; note = 2'-O-methyl modified nucleotide

SEQ ID NO: 982 - RNA, 41 nt, synthetic construct; identical to SEQ ID NO: 589
  source 1..41: mol_type = other RNA
  modified_base 1: mod_base = OTHER; note = 2'-O-methyl modified nucleotide with phosphorothioate linkage
  modified_base 2: mod_base = OTHER; note = 2'-O-methyl modified nucleotide with phosphorothioate linkage
  modified_base 3: mod_base = OTHER; note = 2'-O-methyl modified nucleotide with phosphorothioate linkage
  modified_base 38: mod_base = OTHER; note = Nucleotide with phosphorothioate linkage
  modified_base 39: mod_base = OTHER; note = 2'-O-methyl modified nucleotide with phosphorothioate linkage
  modified_base 40: mod_base = OTHER; note = 2'-O-methyl modified nucleotide with phosphorothioate linkage
  modified_base 41: mod_base = OTHER; note = 2'-O-methyl modified nucleotide

SEQ ID NO: 983 - RNA, 41 nt, synthetic construct; identical to SEQ ID NO: 590
  source 1..41: mol_type = other RNA
  modified_base 1: mod_base = OTHER; note = 2'-O-methyl modified nucleotide with phosphorothioate linkage
  modified_base 2: mod_base = OTHER; note = 2'-O-methyl modified nucleotide with phosphorothioate linkage
  modified_base 3: mod_base = OTHER; note = 2'-O-methyl modified nucleotide with phosphorothioate linkage
  modified_base 38: mod_base = OTHER; note = Nucleotide with phosphorothioate linkage
  modified_base 39: mod_base = OTHER; note = 2'-O-methyl modified nucleotide with phosphorothioate linkage
  modified_base 40: mod_base = OTHER; note = 2'-O-methyl modified nucleotide with phosphorothioate linkage
  modified_base 41: mod_base = OTHER; note = 2'-O-methyl modified nucleotide

SEQ ID NO: 984 - RNA, 41 nt, synthetic construct; identical to SEQ ID NO: 591
  source 1..41: mol_type = other RNA
  modified_base 1: mod_base = OTHER; note = 2'-O-methyl modified nucleotide with phosphorothioate linkage
  modified_base 2: mod_base = OTHER; note = 2'-O-methyl modified nucleotide with phosphorothioate linkage
  modified_base 3: mod_base = OTHER; note = 2'-O-methyl modified nucleotide with phosphorothioate linkage
  modified_base 38: mod_base = OTHER; note = Nucleotide with phosphorothioate linkage
  modified_base 39: mod_base = OTHER; note = 2'-O-methyl modified nucleotide with phosphorothioate linkage
  modified_base 40: mod_base = OTHER; note = 2'-O-methyl modified nucleotide with phosphorothioate linkage
  modified_base 41: mod_base = OTHER; note = 2'-O-methyl modified nucleotide

SEQ ID NO: 985 - RNA, 41 nt, synthetic construct; identical to SEQ ID NO: 592
  source 1..41: mol_type = other RNA
  modified_base 1: mod_base = OTHER; note = 2'-O-methyl modified nucleotide with phosphorothioate linkage
  modified_base 2: mod_base = OTHER; note = 2'-O-methyl modified nucleotide with phosphorothioate linkage
  modified_base 3: mod_base = OTHER; note = 2'-O-methyl modified nucleotide with phosphorothioate linkage
  modified_base 38: mod_base = OTHER; note = Nucleotide with phosphorothioate linkage
  modified_base 39: mod_base = OTHER; note = 2'-O-methyl modified nucleotide with phosphorothioate linkage
  modified_base 40: mod_base = OTHER; note = 2'-O-methyl modified nucleotide with phosphorothioate linkage
  modified_base 41: mod_base = OTHER; note = 2'-O-methyl modified nucleotide

SEQ ID NO: 986 - RNA, 41 nt, synthetic construct; identical to SEQ ID NO: 593
  source 1..41: mol_type = other RNA
  modified_base 1: mod_base = OTHER; note = 2'-O-methyl modified nucleotide with phosphorothioate linkage
  modified_base 2: mod_base = OTHER; note = 2'-O-methyl modified nucleotide with phosphorothioate linkage
  modified_base 3: mod_base = OTHER; note = 2'-O-methyl modified nucleotide with phosphorothioate linkage
  modified_base 38: mod_base = OTHER; note = Nucleotide with phosphorothioate linkage
  modified_base 39: mod_base = OTHER; note = 2'-O-methyl modified nucleotide with phosphorothioate linkage
  modified_base 40: mod_base = OTHER; note = 2'-O-methyl modified nucleotide with phosphorothioate linkage
  modified_base 41: mod_base = OTHER; note = 2'-O-methyl modified nucleotide

SEQ ID NO: 987 - RNA, 41 nt, synthetic construct; identical to SEQ ID NO: 594
  source 1..41: mol_type = other RNA
  modified_base 1: mod_base = OTHER; note = 2'-O-methyl modified nucleotide with phosphorothioate linkage
  modified_base 2: mod_base = OTHER; note = 2'-O-methyl modified nucleotide with phosphorothioate linkage
  modified_base 3: mod_base = OTHER; note = 2'-O-methyl modified nucleotide with phosphorothioate linkage
  modified_base 38: mod_base = OTHER; note = Nucleotide with phosphorothioate linkage
  modified_base 39: mod_base = OTHER; note = 2'-O-methyl modified nucleotide with phosphorothioate linkage
  modified_base 40: mod_base = OTHER; note = 2'-O-methyl modified nucleotide with phosphorothioate linkage
  modified_base 41: mod_base = OTHER; note = 2'-O-methyl modified nucleotide

SEQ ID NO: 988 - RNA, 41 nt, synthetic construct; identical to SEQ ID NO: 595
  source 1..41: mol_type = other RNA
  modified_base 1: mod_base = OTHER; note = 2'-O-methyl modified nucleotide with phosphorothioate linkage
  modified_base 2: mod_base = OTHER; note = 2'-O-methyl modified nucleotide with phosphorothioate linkage
  modified_base 3: mod_base = OTHER; note = 2'-O-methyl modified nucleotide with phosphorothioate linkage
  modified_base 38: mod_base = OTHER; note = Nucleotide with phosphorothioate linkage
  modified_base 39: mod_base = OTHER; note = 2'-O-methyl modified nucleotide with phosphorothioate linkage
  modified_base 40: mod_base = OTHER; note = 2'-O-methyl modified nucleotide with phosphorothioate linkage
  modified_base 41: mod_base = OTHER; note = 2'-O-methyl modified nucleotide

SEQ ID NO: 989 - RNA, 41 nt, synthetic construct; identical to SEQ ID NO: 596
  source 1..41: mol_type = other RNA
  modified_base 1: mod_base = OTHER; note = 2'-O-methyl modified nucleotide with phosphorothioate linkage
  modified_base 2: mod_base = OTHER; note = 2'-O-methyl modified nucleotide with phosphorothioate linkage
  modified_base 3: mod_base = OTHER; note = 2'-O-methyl modified nucleotide with phosphorothioate linkage
  modified_base 38: mod_base = OTHER; note = Nucleotide with phosphorothioate linkage
  modified_base 39: mod_base = OTHER; note = 2'-O-methyl modified nucleotide with phosphorothioate linkage
  modified_base 40: mod_base = OTHER; note = 2'-O-methyl modified nucleotide with phosphorothioate linkage
  modified_base 41: mod_base = OTHER; note = 2'-O-methyl modified nucleotide

SEQ ID NO: 990 - RNA, 41 nt, synthetic construct; identical to SEQ ID NO: 597
  source 1..41: mol_type = other RNA
  modified_base 1: mod_base = OTHER; note = 2'-O-methyl modified nucleotide with phosphorothioate linkage
  modified_base 2: mod_base = OTHER; note = 2'-O-methyl modified nucleotide with phosphorothioate linkage
  modified_base 3: mod_base = OTHER; note = 2'-O-methyl modified nucleotide with phosphorothioate linkage
  modified_base 38: mod_base = OTHER; note = Nucleotide with phosphorothioate linkage
  modified_base 39: mod_base = OTHER; note = 2'-O-methyl modified nucleotide with phosphorothioate linkage
  modified_base 40: mod_base = OTHER; note = 2'-O-methyl modified nucleotide with phosphorothioate linkage
  modified_base 41: mod_base = OTHER; note = 2'-O-methyl modified nucleotide

SEQ ID NO: 991 - RNA, 41 nt, synthetic construct; identical to SEQ ID NO: 598
  source 1..41: mol_type = other RNA
  modified_base 1: mod_base = OTHER; note = 2'-O-methyl modified nucleotide with phosphorothioate linkage
  modified_base 2: mod_base = OTHER; note = 2'-O-methyl modified nucleotide with phosphorothioate linkage
  modified_base 3: mod_base = OTHER; note = 2'-O-methyl modified nucleotide with phosphorothioate linkage
  modified_base 38: mod_base = OTHER; note = Nucleotide with phosphorothioate linkage
  modified_base 39: mod_base = OTHER; note = 2'-O-methyl modified nucleotide with phosphorothioate linkage
  modified_base 40: mod_base = OTHER; note = 2'-O-methyl modified nucleotide with phosphorothioate linkage
  modified_base 41: mod_base = OTHER; note = 2'-O-methyl modified nucleotide

SEQ ID NO: 992 - RNA, 41 nt, synthetic construct; identical to SEQ ID NO: 599
  source 1..41: mol_type = other RNA
  modified_base 1: mod_base = OTHER; note = 2'-O-methyl modified nucleotide with phosphorothioate linkage
  modified_base 2: mod_base = OTHER; note = 2'-O-methyl modified nucleotide with phosphorothioate linkage
  modified_base 3: mod_base = OTHER; note = 2'-O-methyl modified nucleotide with phosphorothioate linkage
  modified_base 38: mod_base = OTHER; note = Nucleotide with phosphorothioate linkage
  modified_base 39: mod_base = OTHER; note = 2'-O-methyl modified nucleotide with phosphorothioate linkage
  modified_base 40: mod_base = OTHER; note = 2'-O-methyl modified nucleotide with phosphorothioate linkage
  modified_base 41: mod_base = OTHER; note = 2'-O-methyl modified nucleotide

SEQ ID NO: 993 - RNA, 41 nt, synthetic construct; identical to SEQ ID NO: 600
  source 1..41: mol_type = other RNA
  modified_base 1: mod_base = OTHER; note = 2'-O-methyl modified nucleotide with phosphorothioate linkage
  modified_base 2: mod_base = OTHER; note = 2'-O-methyl modified nucleotide with phosphorothioate linkage
  modified_base 3: mod_base = OTHER; note = 2'-O-methyl modified nucleotide with phosphorothioate linkage
  modified_base 38: mod_base = OTHER; note = Nucleotide with phosphorothioate linkage
  modified_base 39: mod_base = OTHER; note = 2'-O-methyl modified nucleotide with phosphorothioate linkage
  modified_base 40: mod_base = OTHER; note = 2'-O-methyl modified nucleotide with phosphorothioate linkage
  modified_base 41: mod_base = OTHER; note = 2'-O-methyl modified nucleotide

SEQ ID NO: 994 - RNA, 41 nt, synthetic construct; identical to SEQ ID NO: 601
  source 1..41: mol_type = other RNA
  modified_base 1: mod_base = OTHER; note = 2'-O-methyl modified nucleotide with phosphorothioate linkage
  modified_base 2: mod_base = OTHER; note = 2'-O-methyl modified nucleotide with phosphorothioate linkage
  modified_base 3: mod_base = OTHER; note = 2'-O-methyl modified nucleotide with phosphorothioate linkage
  modified_base 38: mod_base = OTHER; note = Nucleotide with phosphorothioate linkage
  modified_base 39: mod_base = OTHER; note = 2'-O-methyl modified nucleotide with phosphorothioate linkage
  modified_base 40: mod_base = OTHER; note = 2'-O-methyl modified nucleotide with phosphorothioate linkage
  modified_base 41: mod_base = OTHER; note = 2'-O-methyl modified nucleotide

SEQ ID NO: 995 - RNA, 41 nt, synthetic construct; identical to SEQ ID NO: 602
  source 1..41: mol_type = other RNA
  modified_base 1: mod_base = OTHER; note = 2'-O-methyl modified nucleotide with phosphorothioate linkage
  modified_base 2: mod_base = OTHER; note = 2'-O-methyl modified nucleotide with phosphorothioate linkage
  modified_base 3: mod_base = OTHER; note = 2'-O-methyl modified nucleotide with phosphorothioate linkage
  modified_base 38: mod_base = OTHER; note = Nucleotide with phosphorothioate linkage
  modified_base 39: mod_base = OTHER; note = 2'-O-methyl modified nucleotide with phosphorothioate linkage
  modified_base 40: mod_base = OTHER; note = 2'-O-methyl modified nucleotide with phosphorothioate linkage
  modified_base 41: mod_base = OTHER; note = 2'-O-methyl modified nucleotide

SEQ ID NO: 996 - RNA, 41 nt, synthetic construct; identical to SEQ ID NO: 603
  source 1..41: mol_type = other RNA
  modified_base 1: mod_base = OTHER; note = 2'-O-methyl modified nucleotide with phosphorothioate linkage
  modified_base 2: mod_base = OTHER; note = 2'-O-methyl modified nucleotide with phosphorothioate linkage
  modified_base 3: mod_base = OTHER; note = 2'-O-methyl modified nucleotide with phosphorothioate linkage
  modified_base 38: mod_base = OTHER; note = Nucleotide with phosphorothioate linkage
  modified_base 39: mod_base = OTHER; note = 2'-O-methyl modified nucleotide with phosphorothioate linkage
  modified_base 40: mod_base = OTHER; note = 2'-O-methyl modified nucleotide with phosphorothioate linkage
  modified_base 41: mod_base = OTHER; note = 2'-O-methyl modified nucleotide

SEQ ID NO: 997 - RNA, 41 nt, synthetic construct; identical to SEQ ID NO: 604
  source 1..41: mol_type = other RNA
  modified_base 1: mod_base = OTHER; note = 2'-O-methyl modified nucleotide with phosphorothioate linkage
  modified_base 2: mod_base = OTHER; note = 2'-O-methyl modified nucleotide with phosphorothioate linkage
  modified_base 3: mod_base = OTHER; note = 2'-O-methyl modified nucleotide with phosphorothioate linkage
  modified_base 38: mod_base = OTHER; note = Nucleotide with phosphorothioate linkage
  modified_base 39: mod_base = OTHER; note = 2'-O-methyl modified nucleotide with phosphorothioate linkage
  modified_base 40: mod_base = OTHER; note = 2'-O-methyl modified nucleotide with phosphorothioate linkage
  modified_base 41: mod_base = OTHER; note = 2'-O-methyl modified nucleotide

SEQ ID NO: 998 - RNA, 41 nt, synthetic construct; identical to SEQ ID NO: 605
  source 1..41: mol_type = other RNA
  modified_base 1: mod_base = OTHER; note = 2'-O-methyl modified nucleotide with phosphorothioate linkage
  modified_base 2: mod_base = OTHER; note = 2'-O-methyl modified nucleotide with phosphorothioate linkage
  modified_base 3: mod_base = OTHER; note = 2'-O-methyl modified nucleotide with phosphorothioate linkage
  modified_base 38: mod_base = OTHER; note = Nucleotide with phosphorothioate linkage
  modified_base 39: mod_base = OTHER; note = 2'-O-methyl modified nucleotide with phosphorothioate linkage
  modified_base 40: mod_base = OTHER; note = 2'-O-methyl modified nucleotide with phosphorothioate linkage
  modified_base 41: mod_base = OTHER; note = 2'-O-methyl modified nucleotide

SEQ ID NO: 999 - RNA, 41 nt, synthetic construct; identical to SEQ ID NO: 606
  source 1..41: mol_type = other RNA
  modified_base 1: mod_base = OTHER; note = 2'-O-methyl modified nucleotide with phosphorothioate linkage
  modified_base 2: mod_base = OTHER; note = 2'-O-methyl modified nucleotide with phosphorothioate linkage
  modified_base 3: mod_base = OTHER; note = 2'-O-methyl modified nucleotide with phosphorothioate linkage
  modified_base 38: mod_base = OTHER; note = Nucleotide with phosphorothioate linkage
  modified_base 39: mod_base = OTHER; note = 2'-O-methyl modified nucleotide with phosphorothioate linkage
  modified_base 40: mod_base = OTHER; note = 2'-O-methyl modified nucleotide with phosphorothioate linkage
  modified_base 41: mod_base = OTHER; note = 2'-O-methyl modified nucleotide

SEQ ID NO: 1000 - RNA, 41 nt, synthetic construct; identical to SEQ ID NO: 607
  source 1..41: mol_type = other RNA
  modified_base 1: mod_base = OTHER; note = 2'-O-methyl modified nucleotide with phosphorothioate linkage
  modified_base 2: mod_base = OTHER; note = 2'-O-methyl modified nucleotide with phosphorothioate linkage
  modified_base 3: mod_base = OTHER; note = 2'-O-methyl modified nucleotide with phosphorothioate linkage
  modified_base 38: mod_base = OTHER; note = Nucleotide with phosphorothioate linkage
  modified_base 39: mod_base = OTHER; note = 2'-O-methyl modified nucleotide with phosphorothioate linkage
  modified_base 40: mod_base = OTHER; note = 2'-O-methyl modified nucleotide with phosphorothioate linkage
  modified_base 41: mod_base = OTHER; note = 2'-O-methyl modified nucleotide

SEQ ID NO: 1001 - RNA, 41 nt, synthetic construct; identical to SEQ ID NO: 608
  source 1..41: mol_type = other RNA
  modified_base 1: mod_base = OTHER; note = 2'-O-methyl modified nucleotide with phosphorothioate linkage
  modified_base 2: mod_base = OTHER; note = 2'-O-methyl modified nucleotide with phosphorothioate linkage
  modified_base 3: mod_base = OTHER; note = 2'-O-methyl modified nucleotide with phosphorothioate linkage
  modified_base 38: mod_base = OTHER; note = Nucleotide with phosphorothioate linkage
  modified_base 39: mod_base = OTHER; note = 2'-O-methyl modified nucleotide with phosphorothioate linkage
  modified_base 40: mod_base = OTHER; note = 2'-O-methyl modified nucleotide with phosphorothioate linkage
  modified_base 41: mod_base = OTHER; note = 2'-O-methyl modified nucleotide

SEQ ID NO: 1002 - RNA, 41 nt, synthetic construct; identical to SEQ ID NO: 609
  source 1..41: mol_type = other RNA
  modified_base 1: mod_base = OTHER; note = 2'-O-methyl modified nucleotide with phosphorothioate linkage
  modified_base 2: mod_base = OTHER; note = 2'-O-methyl modified nucleotide with phosphorothioate linkage
  modified_base 3: mod_base = OTHER; note = 2'-O-methyl modified nucleotide with phosphorothioate linkage
  modified_base 38: mod_base = OTHER; note = Nucleotide with phosphorothioate linkage
  modified_base 39: mod_base = OTHER; note = 2'-O-methyl modified nucleotide with phosphorothioate linkage
  modified_base 40: mod_base = OTHER; note = 2'-O-methyl modified nucleotide with phosphorothioate linkage
  modified_base 41: mod_base = OTHER; note = 2'-O-methyl modified nucleotide

SEQ ID NO: 1003 - RNA, 41 nt, synthetic construct; identical to SEQ ID NO: 610
  source 1..41: mol_type = other RNA
  modified_base 1: mod_base = OTHER; note = 2'-O-methyl modified nucleotide with phosphorothioate linkage
  modified_base 2: mod_base = OTHER; note = 2'-O-methyl modified nucleotide with phosphorothioate linkage
  modified_base 3: mod_base = OTHER; note = 2'-O-methyl modified nucleotide with phosphorothioate linkage
  modified_base 38: mod_base = OTHER; note = Nucleotide with phosphorothioate linkage
  modified_base 39: mod_base = OTHER; note = 2'-O-methyl modified nucleotide with phosphorothioate linkage
  modified_base 40: mod_base = OTHER; note = 2'-O-methyl modified nucleotide with phosphorothioate linkage
  modified_base 41: mod_base = OTHER; note = 2'-O-methyl modified nucleotide

SEQ ID NO: 1004 - RNA, 41 nt, synthetic construct; identical to SEQ ID NO: 611
  source 1..41: mol_type = other RNA
  modified_base 1: mod_base = OTHER; note = 2'-O-methyl modified nucleotide with phosphorothioate linkage
  modified_base 2: mod_base = OTHER; note = 2'-O-methyl modified nucleotide with phosphorothioate linkage
  modified_base 3: mod_base = OTHER; note = 2'-O-methyl modified nucleotide with phosphorothioate linkage
  modified_base 38: mod_base = OTHER; note = Nucleotide with phosphorothioate linkage
  modified_base 39: mod_base = OTHER; note = 2'-O-methyl modified nucleotide with phosphorothioate linkage
  modified_base 40: mod_base = OTHER; note = 2'-O-methyl modified nucleotide with phosphorothioate linkage
  modified_base 41: mod_base = OTHER; note = 2'-O-methyl modified nucleotide

SEQ ID NO: 1005 - RNA, 41 nt, synthetic construct; identical to SEQ ID NO: 612
  source 1..41: mol_type = other RNA
  modified_base 1: mod_base = OTHER; note = 2'-O-methyl modified nucleotide with phosphorothioate linkage
  modified_base 2: mod_base = OTHER; note = 2'-O-methyl modified nucleotide with phosphorothioate linkage
  modified_base 3: mod_base = OTHER; note = 2'-O-methyl modified nucleotide with phosphorothioate linkage
  modified_base 38: mod_base = OTHER; note = Nucleotide with phosphorothioate linkage
  modified_base 39: mod_base = OTHER; note = 2'-O-methyl modified nucleotide with phosphorothioate linkage
  modified_base 40: mod_base = OTHER; note = 2'-O-methyl modified nucleotide with phosphorothioate linkage
  modified_base 41: mod_base = OTHER; note = 2'-O-methyl modified nucleotide

SEQ ID NO: 1006 - RNA, 41 nt, synthetic construct; identical to SEQ ID NO: 613
  source 1..41: mol_type = other RNA
  modified_base 1: mod_base = OTHER; note = 2'-O-methyl modified nucleotide with phosphorothioate linkage
  modified_base 2: mod_base = OTHER; note = 2'-O-methyl modified nucleotide with phosphorothioate linkage
  modified_base 3: mod_base = OTHER; note = 2'-O-methyl modified nucleotide with phosphorothioate linkage
  modified_base 38: mod_base = OTHER; note = Nucleotide with phosphorothioate linkage
  modified_base 39: mod_base = OTHER; note = 2'-O-methyl modified nucleotide with phosphorothioate linkage
  modified_base 40: mod_base = OTHER; note = 2'-O-methyl modified nucleotide with phosphorothioate linkage
  modified_base 41: mod_base = OTHER; note = 2'-O-methyl modified nucleotide

SEQ ID NO: 1007 - RNA, 46 nt, synthetic construct; identical to SEQ ID NO: 614
  source 1..46: mol_type = other RNA
  modified_base 1: mod_base = OTHER; note = 2'-O-methyl modified nucleotide with phosphorothioate linkage
  modified_base 2: mod_base = OTHER; note = 2'-O-methyl modified nucleotide with phosphorothioate linkage
  modified_base 3: mod_base = OTHER; note = 2'-O-methyl modified nucleotide with phosphorothioate linkage
  modified_base 43: mod_base = OTHER; note = Nucleotide with phosphorothioate linkage
  modified_base 44: mod_base = OTHER; note = 2'-O-methyl modified nucleotide with phosphorothioate linkage
  modified_base 45: mod_base = OTHER; note = 2'-O-methyl modified nucleotide with phosphorothioate linkage
  modified_base 46: mod_base = OTHER; note = 2'-O-methyl modified nucleotide

SEQ ID NO: 1008 - RNA, 46 nt, synthetic construct; identical to SEQ ID NO: 615
  source 1..46: mol_type = other RNA
  modified_base 1: mod_base = OTHER; note = 2'-O-methyl modified nucleotide with phosphorothioate linkage
  modified_base 2: mod_base = OTHER; note = 2'-O-methyl modified nucleotide with phosphorothioate linkage
  modified_base 3: mod_base = OTHER; note = 2'-O-methyl modified nucleotide with phosphorothioate linkage
  modified_base 43: mod_base = OTHER; note = Nucleotide with phosphorothioate linkage
  modified_base 44: mod_base = OTHER; note = 2'-O-methyl modified nucleotide with phosphorothioate linkage
  modified_base 45: mod_base = OTHER; note = 2'-O-methyl modified nucleotide with phosphorothioate linkage
  modified_base 46: mod_base = OTHER; note = 2'-O-methyl modified nucleotide

SEQ ID NO: 1009 - RNA, 46 nt, synthetic construct; identical to SEQ ID NO: 616
  source 1..46: mol_type = other RNA
  modified_base 1: mod_base = OTHER; note = 2'-O-methyl modified nucleotide with phosphorothioate linkage
  modified_base 2: mod_base = OTHER; note = 2'-O-methyl modified nucleotide with phosphorothioate linkage
  modified_base 3: mod_base = OTHER; note = 2'-O-methyl modified nucleotide with phosphorothioate linkage
  modified_base 43: mod_base = OTHER; note = Nucleotide with phosphorothioate linkage
  modified_base 44: mod_base = OTHER; note = 2'-O-methyl modified nucleotide with phosphorothioate linkage
  modified_base 45: mod_base = OTHER; note = 2'-O-methyl modified nucleotide with phosphorothioate linkage
  modified_base 46: mod_base = OTHER; note = 2'-O-methyl modified nucleotide

SEQ ID NO: 1010 - RNA, 46 nt, synthetic construct; identical to SEQ ID NO: 617
  source 1..46: mol_type = other RNA
  modified_base 1: mod_base = OTHER; note = 2'-O-methyl modified nucleotide with phosphorothioate linkage
  modified_base 2: mod_base = OTHER; note = 2'-O-methyl modified nucleotide with phosphorothioate linkage
  modified_base 3: mod_base = OTHER; note = 2'-O-methyl modified nucleotide with phosphorothioate linkage
  modified_base 43: mod_base = OTHER; note = Nucleotide with phosphorothioate linkage
  modified_base 44: mod_base = OTHER; note = 2'-O-methyl modified nucleotide with phosphorothioate linkage
  modified_base 45: mod_base = OTHER; note = 2'-O-methyl modified nucleotide with phosphorothioate linkage
  modified_base 46: mod_base = OTHER; note = 2'-O-methyl modified nucleotide

SEQ ID NO: 1011 - RNA, 46 nt, synthetic construct; identical to SEQ ID NO: 618
  source 1..46: mol_type = other RNA
  modified_base 1: mod_base = OTHER; note = 2'-O-methyl modified nucleotide with phosphorothioate linkage
  modified_base 2: mod_base = OTHER; note = 2'-O-methyl modified nucleotide with phosphorothioate linkage
  modified_base 3: mod_base = OTHER; note = 2'-O-methyl modified nucleotide with phosphorothioate linkage
  modified_base 43: mod_base = OTHER; note = Nucleotide with phosphorothioate linkage
  modified_base 44: mod_base = OTHER; note = 2'-O-methyl modified nucleotide with phosphorothioate linkage
  modified_base 45: mod_base = OTHER; note = 2'-O-methyl modified nucleotide with phosphorothioate linkage
  modified_base 46: mod_base = OTHER; note = 2'-O-methyl modified nucleotide

SEQ ID NO: 1012 - RNA, 46 nt, synthetic construct; identical to SEQ ID NO: 619
  source 1..46: mol_type = other RNA
  modified_base 1: mod_base = OTHER; note = 2'-O-methyl modified nucleotide with phosphorothioate linkage
  modified_base 2: mod_base = OTHER; note = 2'-O-methyl modified nucleotide with phosphorothioate linkage
  modified_base 3: mod_base = OTHER; note = 2'-O-methyl modified nucleotide with phosphorothioate linkage
  modified_base 43: mod_base = OTHER; note = Nucleotide with phosphorothioate linkage
  modified_base 44: mod_base = OTHER; note = 2'-O-methyl modified nucleotide with phosphorothioate linkage
  modified_base 45: mod_base = OTHER; note = 2'-O-methyl modified nucleotide with phosphorothioate linkage
  modified_base 46: mod_base = OTHER; note = 2'-O-methyl modified nucleotide

SEQ ID NO: 1013 - RNA, 46 nt, synthetic construct; identical to SEQ ID NO: 620
  source 1..46: mol_type = other RNA
  modified_base 1: mod_base = OTHER; note = 2'-O-methyl modified nucleotide with phosphorothioate linkage
  modified_base 2: mod_base = OTHER; note = 2'-O-methyl modified nucleotide with phosphorothioate linkage
  modified_base 3: mod_base = OTHER; note = 2'-O-methyl modified nucleotide with phosphorothioate linkage
  modified_base 43: mod_base = OTHER; note = Nucleotide with phosphorothioate linkage
  modified_base 44: mod_base = OTHER; note = 2'-O-methyl modified nucleotide with phosphorothioate linkage
  modified_base 45: mod_base = OTHER; note = 2'-O-methyl modified nucleotide with phosphorothioate linkage
  modified_base 46: mod_base = OTHER; note = 2'-O-methyl modified nucleotide

SEQ ID NO: 1014 - RNA, 37 nt, synthetic construct; identical to SEQ ID NO: 621
  source 1..37: mol_type = other RNA
  modified_base 1: mod_base = OTHER; note = 2'-O-methyl modified nucleotide with phosphorothioate linkage
  modified_base 2: mod_base = OTHER; note = 2'-O-methyl modified nucleotide with phosphorothioate linkage
  modified_base 3: mod_base = OTHER; note = 2'-O-methyl modified nucleotide with phosphorothioate linkage
  modified_base 34: mod_base = OTHER; note = Nucleotide with phosphorothioate linkage
  modified_base 35: mod_base = OTHER; note = 2'-O-methyl modified nucleotide with phosphorothioate linkage
  modified_base 36: mod_base = OTHER; note = 2'-O-methyl modified nucleotide with phosphorothioate linkage
  modified_base 37: mod_base = OTHER; note = 2'-O-methyl modified nucleotide

SEQ ID NO: 1015 - RNA, 37 nt, synthetic construct; identical to SEQ ID NO: 622
  source 1..37: mol_type = other RNA
  modified_base 1: mod_base = OTHER; note = 2'-O-methyl modified nucleotide with phosphorothioate linkage
  modified_base 2: mod_base = OTHER; note = 2'-O-methyl modified nucleotide with phosphorothioate linkage
  modified_base 3: mod_base = OTHER; note = 2'-O-methyl modified nucleotide with phosphorothioate linkage
  modified_base 34: mod_base = OTHER; note = Nucleotide with phosphorothioate linkage
  modified_base 35: mod_base = OTHER; note = 2'-O-methyl modified nucleotide with phosphorothioate linkage
  modified_base 36: mod_base = OTHER; note = 2'-O-methyl modified nucleotide with phosphorothioate linkage
  modified_base 37: mod_base = OTHER; note = 2'-O-methyl modified nucleotide

SEQ ID NO: 1016 - RNA, 37 nt, synthetic construct; identical to SEQ ID NO: 623
  source 1..37: mol_type = other RNA
  modified_base 1: mod_base = OTHER; note = 2'-O-methyl modified nucleotide with phosphorothioate linkage
  modified_base 2: mod_base = OTHER; note = 2'-O-methyl modified nucleotide with phosphorothioate linkage
  modified_base 3: mod_base = OTHER; note = 2'-O-methyl modified nucleotide with phosphorothioate linkage
  modified_base 34: mod_base = OTHER; note = Nucleotide with phosphorothioate linkage
  modified_base 35: mod_base = OTHER; note = 2'-O-methyl modified nucleotide with phosphorothioate linkage
  modified_base 36: mod_base = OTHER; note = 2'-O-methyl modified nucleotide with phosphorothioate linkage
  modified_base 37: mod_base = OTHER; note = 2'-O-methyl modified nucleotide

SEQ ID NO: 1017 - RNA, 46 nt, synthetic construct; identical to SEQ ID NO: 624
  source 1..46: mol_type = other RNA
  modified_base 1: mod_base = OTHER; note = 2'-O-methyl modified nucleotide with phosphorothioate linkage
  modified_base 2: mod_base = OTHER; note = 2'-O-methyl modified nucleotide with phosphorothioate linkage
  modified_base 3: mod_base = OTHER; note = 2'-O-methyl modified nucleotide with phosphorothioate linkage
  modified_base 43: mod_base = OTHER; note = Nucleotide with phosphorothioate linkage
  modified_base 44: mod_base = OTHER; note = 2'-O-methyl modified nucleotide with phosphorothioate linkage
  modified_base 45: mod_base = OTHER; note = 2'-O-methyl modified nucleotide with phosphorothioate linkage
  modified_base 46: mod_base = OTHER; note = 2'-O-methyl modified nucleotide

SEQ ID NO: 1018 - RNA, 46 nt, synthetic construct; identical to SEQ ID NO: 625
  source 1..46: mol_type = other RNA
  modified_base 1: mod_base = OTHER; note = 2'-O-methyl modified nucleotide with phosphorothioate linkage
  modified_base 2: mod_base = OTHER; note = 2'-O-methyl modified nucleotide with phosphorothioate linkage
  modified_base 3: mod_base = OTHER; note = 2'-O-methyl modified nucleotide with phosphorothioate linkage
  modified_base 43: mod_base = OTHER; note = Nucleotide with phosphorothioate linkage
  modified_base 44: mod_base = OTHER; note = 2'-O-methyl modified nucleotide with phosphorothioate linkage
  modified_base 45: mod_base = OTHER; note = 2'-O-methyl modified nucleotide with phosphorothioate linkage
  modified_base 46: mod_base = OTHER; note = 2'-O-methyl modified nucleotide

SEQ ID NO: 1019 - RNA, 46 nt, synthetic construct; identical to SEQ ID NO: 626
  source 1..46: mol_type = other RNA
  modified_base 1: mod_base = OTHER; note = 2'-O-methyl modified nucleotide with phosphorothioate linkage
  modified_base 2: mod_base = OTHER; note = 2'-O-methyl modified nucleotide with phosphorothioate linkage
  modified_base 3: mod_base = OTHER; note = 2'-O-methyl modified nucleotide with phosphorothioate linkage
  modified_base 43: mod_base = OTHER; note = Nucleotide with phosphorothioate linkage
  modified_base 44: mod_base = OTHER; note = 2'-O-methyl modified nucleotide with phosphorothioate linkage
  modified_base 45: mod_base = OTHER; note = 2'-O-methyl modified nucleotide with phosphorothioate linkage
  modified_base 46: mod_base = OTHER; note = 2'-O-methyl modified nucleotide

SEQ ID NO: 1020 - RNA, 46 nt, synthetic construct; identical to SEQ ID NO: 627
  source 1..46: mol_type = other RNA
  modified_base 1: mod_base = OTHER; note = 2'-O-methyl modified nucleotide with phosphorothioate linkage
  modified_base 2: mod_base = OTHER; note = 2'-O-methyl modified nucleotide with phosphorothioate linkage
  modified_base 3: mod_base = OTHER; note = 2'-O-methyl modified nucleotide with phosphorothioate linkage
  modified_base 43: mod_base = OTHER; note = Nucleotide with phosphorothioate linkage
  modified_base 44: mod_base = OTHER; note = 2'-O-methyl modified nucleotide with phosphorothioate linkage
  modified_base 45: mod_base = OTHER; note = 2'-O-methyl modified nucleotide with phosphorothioate linkage
  modified_base 46: mod_base = OTHER; note = 2'-O-methyl modified nucleotide

SEQ ID NO: 1021 - RNA, 46 nt, synthetic construct; identical to SEQ ID NO: 628
  source 1..46: mol_type = other RNA
  modified_base 1: mod_base = OTHER; note = 2'-O-methyl modified nucleotide with phosphorothioate linkage
  modified_base 2: mod_base = OTHER; note = 2'-O-methyl modified nucleotide with phosphorothioate linkage
  modified_base 3: mod_base = OTHER; note = 2'-O-methyl modified nucleotide with phosphorothioate linkage
  modified_base 43: mod_base = OTHER; note = Nucleotide with phosphorothioate linkage
  modified_base 44: mod_base = OTHER; note = 2'-O-methyl modified nucleotide with phosphorothioate linkage
  modified_base 45: mod_base = OTHER; note = 2'-O-methyl modified nucleotide with phosphorothioate linkage
  modified_base 46: mod_base = OTHER; note = 2'-O-methyl modified nucleotide

SEQ ID NO: 1022 - RNA, 46 nt, synthetic construct; identical to SEQ ID NO: 629
  source 1..46: mol_type = other RNA
  modified_base 1: mod_base = OTHER; note = 2'-O-methyl modified nucleotide with phosphorothioate linkage
  modified_base 2: mod_base = OTHER; note = 2'-O-methyl modified nucleotide with phosphorothioate linkage
  modified_base 3: mod_base = OTHER; note = 2'-O-methyl modified nucleotide with phosphorothioate linkage
  modified_base 43: mod_base = OTHER; note = Nucleotide with phosphorothioate linkage
  modified_base 44: mod_base = OTHER; note = 2'-O-methyl modified nucleotide with phosphorothioate linkage
  modified_base 45: mod_base = OTHER; note = 2'-O-methyl modified nucleotide with phosphorothioate linkage
  modified_base 46: mod_base = OTHER; note = 2'-O-methyl modified nucleotide

SEQ ID NO: 1023 - RNA, 46 nt, synthetic construct; identical to SEQ ID NO: 630
  source 1..46: mol_type = other RNA
  modified_base 1: mod_base = OTHER; note = 2'-O-methyl modified nucleotide with phosphorothioate linkage
  modified_base 2: mod_base = OTHER; note = 2'-O-methyl modified nucleotide with phosphorothioate linkage
  modified_base 3: mod_base = OTHER; note = 2'-O-methyl modified nucleotide with phosphorothioate linkage
  modified_base 43: mod_base = OTHER; note = Nucleotide with phosphorothioate linkage
  modified_base 44: mod_base = OTHER; note = 2'-O-methyl modified nucleotide with phosphorothioate linkage
  modified_base 45: mod_base = OTHER; note = 2'-O-methyl modified nucleotide with phosphorothioate linkage
  modified_base 46: mod_base = OTHER; note = 2'-O-methyl modified nucleotide

SEQ ID NO: 1024 - RNA, 46 nt, synthetic construct; identical to SEQ ID NO: 631
  source 1..46: mol_type = other RNA
  modified_base 1: mod_base = OTHER; note = 2'-O-methyl modified nucleotide with phosphorothioate linkage
  modified_base 2: mod_base = OTHER; note = 2'-O-methyl modified nucleotide with phosphorothioate linkage
  modified_base 3: mod_base = OTHER; note = 2'-O-methyl modified nucleotide with phosphorothioate linkage
  modified_base 43: mod_base = OTHER; note = Nucleotide with phosphorothioate linkage
  modified_base 44: mod_base = OTHER; note = 2'-O-methyl modified nucleotide with phosphorothioate linkage
  modified_base 45: mod_base = OTHER; note = 2'-O-methyl modified nucleotide with phosphorothioate linkage
  modified_base 46: mod_base = OTHER; note = 2'-O-methyl modified nucleotide

SEQ ID NO: 1025 - RNA, 46 nt, synthetic construct; identical to SEQ ID NO: 632
  source 1..46: mol_type = other RNA
  modified_base 1: mod_base = OTHER; note = 2'-O-methyl modified nucleotide with phosphorothioate linkage
  modified_base 2: mod_base = OTHER; note = 2'-O-methyl modified nucleotide with phosphorothioate linkage
  modified_base 3: mod_base = OTHER; note = 2'-O-methyl modified nucleotide with phosphorothioate linkage
  modified_base 43: mod_base = OTHER; note = Nucleotide with phosphorothioate linkage
  modified_base 44: mod_base = OTHER; note = 2'-O-methyl modified nucleotide with phosphorothioate linkage
  modified_base 45: mod_base = OTHER; note = 2'-O-methyl modified nucleotide with phosphorothioate linkage
  modified_base 46: mod_base = OTHER; note = 2'-O-methyl modified nucleotide

SEQ ID NO: 1026 - RNA, 46 nt, synthetic construct; identical to SEQ ID NO: 633
  source 1..46: mol_type = other RNA
  modified_base 1: mod_base = OTHER; note = 2'-O-methyl modified nucleotide with phosphorothioate linkage
  modified_base 2: mod_base = OTHER; note = 2'-O-methyl modified nucleotide with phosphorothioate linkage
  modified_base 3: mod_base = OTHER; note = 2'-O-methyl modified nucleotide with phosphorothioate linkage
  modified_base 43: mod_base = OTHER; note = Nucleotide with phosphorothioate linkage
  modified_base 44: mod_base = OTHER; note = 2'-O-methyl modified nucleotide with phosphorothioate linkage
  modified_base 45: mod_base = OTHER; note = 2'-O-methyl modified nucleotide with phosphorothioate linkage
  modified_base 46: mod_base = OTHER; note = 2'-O-methyl modified nucleotide

SEQ ID NO: 1027 - RNA, 46 nt, synthetic construct; identical to SEQ ID NO: 634
  source 1..46: mol_type = other RNA
  modified_base 1: mod_base = OTHER; note = 2'-O-methyl modified nucleotide with phosphorothioate linkage
  modified_base 2: mod_base = OTHER; note = 2'-O-methyl modified nucleotide with phosphorothioate linkage
  modified_base 3: mod_base = OTHER; note = 2'-O-methyl modified nucleotide with phosphorothioate linkage
  modified_base 43: mod_base = OTHER; note = Nucleotide with phosphorothioate linkage
  modified_base 44: mod_base = OTHER; note = 2'-O-methyl modified nucleotide with phosphorothioate linkage
  modified_base 45: mod_base = OTHER; note = 2'-O-methyl modified nucleotide with phosphorothioate linkage
  modified_base 46: mod_base = OTHER; note = 2'-O-methyl modified nucleotide

SEQ ID NO: 1028 - RNA, 46 nt, synthetic construct; identical to SEQ ID NO: 635
  source 1..46: mol_type = other RNA
  modified_base 1: mod_base = OTHER; note = 2'-O-methyl modified nucleotide with phosphorothioate linkage
  modified_base 2: mod_base = OTHER; note = 2'-O-methyl modified nucleotide with phosphorothioate linkage
  modified_base 3: mod_base = OTHER; note = 2'-O-methyl modified nucleotide with phosphorothioate linkage
  modified_base 43: mod_base = OTHER; note = Nucleotide with phosphorothioate linkage
  modified_base 44: mod_base = OTHER; note = 2'-O-methyl modified nucleotide with phosphorothioate linkage
  modified_base 45: mod_base = OTHER; note = 2'-O-methyl modified nucleotide with phosphorothioate linkage
  modified_base 46: mod_base = OTHER; note = 2'-O-methyl modified nucleotide

SEQ ID NO: 1029 - RNA, 46 nt, synthetic construct; identical to SEQ ID NO: 636
  source 1..46: mol_type = other RNA
  modified_base 1: mod_base = OTHER; note = 2'-O-methyl modified nucleotide with phosphorothioate linkage
  modified_base 2: mod_base = OTHER; note = 2'-O-methyl modified nucleotide with phosphorothioate linkage
  modified_base 3: mod_base = OTHER; note = 2'-O-methyl modified nucleotide with phosphorothioate linkage
  modified_base 43: mod_base = OTHER; note = Nucleotide with phosphorothioate linkage
  modified_base 44: mod_base = OTHER; note = 2'-O-methyl modified nucleotide with phosphorothioate linkage
  modified_base 45: mod_base = OTHER; note = 2'-O-methyl modified nucleotide with phosphorothioate linkage
  modified_base 46: mod_base = OTHER; note = 2'-O-methyl modified nucleotide

SEQ ID NO: 1030 - RNA, 46 nt, synthetic construct; identical to SEQ ID NO: 637
  source 1..46: mol_type = other RNA
  modified_base 1: mod_base = OTHER; note = 2'-O-methyl modified nucleotide with phosphorothioate linkage
  modified_base 2: mod_base = OTHER; note = 2'-O-methyl modified nucleotide with phosphorothioate linkage
  modified_base 3: mod_base = OTHER; note = 2'-O-methyl modified nucleotide with phosphorothioate linkage
  modified_base 43: mod_base = OTHER; note = Nucleotide with phosphorothioate linkage
  modified_base 44: mod_base = OTHER; note = 2'-O-methyl modified nucleotide with phosphorothioate linkage
  modified_base 45: mod_base = OTHER; note = 2'-O-methyl modified nucleotide with phosphorothioate linkage
  modified_base 46: mod_base = OTHER; note = 2'-O-methyl modified nucleotide

SEQ ID NO: 1031 - RNA, 46 nt, synthetic construct; identical to SEQ ID NO: 638
  source 1..46: mol_type = other RNA
  modified_base 1: mod_base = OTHER; note = 2'-O-methyl modified nucleotide with phosphorothioate linkage
  modified_base 2: mod_base = OTHER; note = 2'-O-methyl modified nucleotide with phosphorothioate linkage
  modified_base 3: mod_base = OTHER; note = 2'-O-methyl modified nucleotide with phosphorothioate linkage
  modified_base 43: mod_base = OTHER; note = Nucleotide with phosphorothioate linkage
  modified_base 44: mod_base = OTHER; note = 2'-O-methyl modified nucleotide with phosphorothioate linkage
  modified_base 45: mod_base = OTHER; note = 2'-O-methyl modified nucleotide with phosphorothioate linkage
  modified_base 46: mod_base = OTHER; note = 2'-O-methyl modified nucleotide

SEQ ID NO: 1032 - RNA, 46 nt, synthetic construct; identical to SEQ ID NO: 639
  source 1..46: mol_type = other RNA
  modified_base 1: mod_base = OTHER; note = 2'-O-methyl modified nucleotide with phosphorothioate linkage
  modified_base 2: mod_base = OTHER; note = 2'-O-methyl modified nucleotide with phosphorothioate linkage
  modified_base 3: mod_base = OTHER; note = 2'-O-methyl modified nucleotide with phosphorothioate linkage
  modified_base 43: mod_base = OTHER; note = Nucleotide with phosphorothioate linkage
  modified_base 44: mod_base = OTHER; note = 2'-O-methyl modified nucleotide with phosphorothioate linkage
  modified_base 45: mod_base = OTHER; note = 2'-O-methyl modified nucleotide with phosphorothioate linkage
  modified_base 46: mod_base = OTHER; note = 2'-O-methyl modified nucleotide

SEQ ID NO: 1033 - RNA, 46 nt, synthetic construct; identical to SEQ ID NO: 640
  source 1..46: mol_type = other RNA
  modified_base 1: mod_base = OTHER; note = 2'-O-methyl modified nucleotide with phosphorothioate linkage
  modified_base 2: mod_base = OTHER; note = 2'-O-methyl modified nucleotide with phosphorothioate linkage
  modified_base 3: mod_base = OTHER; note = 2'-O-methyl modified nucleotide with phosphorothioate linkage
  modified_base 43: mod_base = OTHER; note = Nucleotide with phosphorothioate linkage
  modified_base 44: mod_base = OTHER; note = 2'-O-methyl modified nucleotide with phosphorothioate linkage
  modified_base 45: mod_base = OTHER; note = 2'-O-methyl modified nucleotide with phosphorothioate linkage
  modified_base 46: mod_base = OTHER; note = 2'-O-methyl modified nucleotide

SEQ ID NO: 1034 - RNA, 46 nt, synthetic construct; identical to SEQ ID NO: 641
  source 1..46: mol_type = other RNA
  modified_base 1: mod_base = OTHER; note = 2'-O-methyl modified nucleotide with phosphorothioate linkage
  modified_base 2: mod_base = OTHER; note = 2'-O-methyl modified nucleotide with phosphorothioate linkage
  modified_base 3: mod_base = OTHER; note = 2'-O-methyl modified nucleotide with phosphorothioate linkage
  modified_base 43: mod_base = OTHER; note = Nucleotide with phosphorothioate linkage
  modified_base 44: mod_base = OTHER; note = 2'-O-methyl modified nucleotide with phosphorothioate linkage
  modified_base 45: mod_base = OTHER; note = 2'-O-methyl modified nucleotide with phosphorothioate linkage
  modified_base 46: mod_base = OTHER; note = 2'-O-methyl modified nucleotide

SEQ ID NO: 1035 - RNA, 46 nt, synthetic construct; identical to SEQ ID NO: 642
  source 1..46: mol_type = other RNA
  modified_base 1: mod_base = OTHER; note = 2'-O-methyl modified nucleotide with phosphorothioate linkage
  modified_base 2: mod_base = OTHER; note = 2'-O-methyl modified nucleotide with phosphorothioate linkage
  modified_base 3: mod_base = OTHER; note = 2'-O-methyl modified nucleotide with phosphorothioate linkage
  modified_base 43: mod_base = OTHER; note = Nucleotide with phosphorothioate linkage
  modified_base 44: mod_base = OTHER; note = 2'-O-methyl modified nucleotide with phosphorothioate linkage
  modified_base 45: mod_base = OTHER; note = 2'-O-methyl modified nucleotide with phosphorothioate linkage
  modified_base 46: mod_base = OTHER; note = 2'-O-methyl modified nucleotide

SEQ ID NO: 1036 - RNA, 46 nt, synthetic construct; identical to SEQ ID NO: 643
  source 1..46: mol_type = other RNA
  modified_base 1: mod_base = OTHER; note = 2'-O-methyl modified nucleotide with phosphorothioate linkage
  modified_base 2: mod_base = OTHER; note = 2'-O-methyl modified nucleotide with phosphorothioate linkage
  modified_base 3: mod_base = OTHER; note = 2'-O-methyl modified nucleotide with phosphorothioate linkage
  modified_base 43: mod_base = OTHER; note = Nucleotide with phosphorothioate linkage
  modified_base 44: mod_base = OTHER; note = 2'-O-methyl modified nucleotide with phosphorothioate linkage
  modified_base 45: mod_base = OTHER; note = 2'-O-methyl modified nucleotide with phosphorothioate linkage
  modified_base 46: mod_base = OTHER; note = 2'-O-methyl modified nucleotide

SEQ ID NO: 1037 - RNA, 46 nt, synthetic construct; identical to SEQ ID NO: 644
  source 1..46: mol_type = other RNA
  modified_base 1: mod_base = OTHER; note = 2'-O-methyl modified nucleotide with phosphorothioate linkage
  modified_base 2: mod_base = OTHER; note = 2'-O-methyl modified nucleotide with phosphorothioate linkage
  modified_base 3: mod_base = OTHER; note = 2'-O-methyl modified nucleotide with phosphorothioate linkage
  modified_base 43: mod_base = OTHER; note = Nucleotide with phosphorothioate linkage
  modified_base 44: mod_base = OTHER; note = 2'-O-methyl modified nucleotide with phosphorothioate linkage
  modified_base 45: mod_base = OTHER; note = 2'-O-methyl modified nucleotide with phosphorothioate linkage
  modified_base 46: mod_base = OTHER; note = 2'-O-methyl modified nucleotide

SEQ ID NO: 1038 - RNA, 46 nt, synthetic construct; identical to SEQ ID NO: 645
  source 1..46: mol_type = other RNA
  modified_base 1: mod_base = OTHER; note = 2'-O-methyl modified nucleotide with phosphorothioate linkage
  modified_base 2: mod_base = OTHER; note = 2'-O-methyl modified nucleotide with phosphorothioate linkage
  modified_base 3: mod_base = OTHER; note = 2'-O-methyl modified nucleotide with phosphorothioate linkage
  modified_base 43: mod_base = OTHER; note = Nucleotide with phosphorothioate linkage
  modified_base 44: mod_base = OTHER; note = 2'-O-methyl modified nucleotide with phosphorothioate linkage
  modified_base 45: mod_base = OTHER; note = 2'-O-methyl modified nucleotide with phosphorothioate linkage
  modified_base 46: mod_base = OTHER; note = 2'-O-methyl modified nucleotide

SEQ ID NO: 1039 - RNA, 46 nt, synthetic construct; identical to SEQ ID NO: 646
  source 1..46: mol_type = other RNA
  modified_base 1: mod_base = OTHER; note = 2'-O-methyl modified nucleotide with phosphorothioate linkage
  modified_base 2: mod_base = OTHER; note = 2'-O-methyl modified nucleotide with phosphorothioate linkage
  modified_base 3: mod_base = OTHER; note = 2'-O-methyl modified nucleotide with phosphorothioate linkage
  modified_base 43: mod_base = OTHER; note = Nucleotide with phosphorothioate linkage
  modified_base 44: mod_base = OTHER; note = 2'-O-methyl modified nucleotide with phosphorothioate linkage
  modified_base 45: mod_base = OTHER; note = 2'-O-methyl modified nucleotide with phosphorothioate linkage
  modified_base 46: mod_base = OTHER; note = 2'-O-methyl modified nucleotide

SEQ ID NO: 1040 - RNA, 46 nt, synthetic construct; identical to SEQ ID NO: 647
  source 1..46: mol_type = other RNA
  modified_base 1: mod_base = OTHER; note = 2'-O-methyl modified nucleotide with phosphorothioate linkage
  modified_base 2: mod_base = OTHER; note = 2'-O-methyl modified nucleotide with phosphorothioate linkage
  modified_base 3: mod_base = OTHER; note = 2'-O-methyl modified nucleotide with phosphorothioate linkage
  modified_base 43: mod_base = OTHER; note = Nucleotide with phosphorothioate linkage
  modified_base 44: mod_base = OTHER; note = 2'-O-methyl modified nucleotide with phosphorothioate linkage
  modified_base 45: mod_base = OTHER; note = 2'-O-methyl modified nucleotide with phosphorothioate linkage
  modified_base 46: mod_base = OTHER; note = 2'-O-methyl modified nucleotide

SEQ ID NO: 1041 - RNA, 46 nt, synthetic construct; identical to SEQ ID NO: 648
  source 1..46: mol_type = other RNA
  modified_base 1: mod_base = OTHER; note = 2'-O-methyl modified nucleotide with phosphorothioate linkage
  modified_base 2: mod_base = OTHER; note = 2'-O-methyl modified nucleotide with phosphorothioate linkage
  modified_base 3: mod_base = OTHER; note = 2'-O-methyl modified nucleotide with phosphorothioate linkage
  modified_base 43: mod_base = OTHER; note = Nucleotide with phosphorothioate linkage
  modified_base 44: mod_base = OTHER; note = 2'-O-methyl modified nucleotide with phosphorothioate linkage
  modified_base 45: mod_base = OTHER; note = 2'-O-methyl modified nucleotide with phosphorothioate linkage
  modified_base 46: mod_base = OTHER; note = 2'-O-methyl modified nucleotide

SEQ ID NO: 1042 - RNA, 46 nt, synthetic construct; identical to SEQ ID NO: 649
  source 1..46: mol_type = other RNA
  modified_base 1: mod_base = OTHER; note = 2'-O-methyl modified nucleotide with phosphorothioate linkage
  modified_base 2: mod_base = OTHER; note = 2'-O-methyl modified nucleotide with phosphorothioate linkage
  modified_base 3: mod_base = OTHER; note = 2'-O-methyl modified nucleotide with phosphorothioate linkage
  modified_base 43: mod_base = OTHER; note = Nucleotide with phosphorothioate linkage
  modified_base 44: mod_base = OTHER; note = 2'-O-methyl modified nucleotide with phosphorothioate linkage
  modified_base 45: mod_base = OTHER; note = 2'-O-methyl modified nucleotide with phosphorothioate linkage
  modified_base 46: mod_base = OTHER; note = 2'-O-methyl modified nucleotide

SEQ ID NO: 1043 - RNA, 46 nt, synthetic construct; identical to SEQ ID NO: 650
  source 1..46: mol_type = other RNA
  modified_base 1: mod_base = OTHER; note = 2'-O-methyl modified nucleotide with phosphorothioate linkage
  modified_base 2: mod_base = OTHER; note = 2'-O-methyl modified nucleotide with phosphorothioate linkage
  modified_base 3: mod_base = OTHER; note = 2'-O-methyl modified nucleotide with phosphorothioate linkage
  modified_base 43: mod_base = OTHER; note = Nucleotide with phosphorothioate linkage
  modified_base 44: mod_base = OTHER; note = 2'-O-methyl modified nucleotide with phosphorothioate linkage
  modified_base 45: mod_base = OTHER; note = 2'-O-methyl modified nucleotide with phosphorothioate linkage
  modified_base 46: mod_base = OTHER; note = 2'-O-methyl modified nucleotide

SEQ ID NO: 1044 - RNA, 46 nt, synthetic construct; identical to SEQ ID NO: 651
  source 1..46: mol_type = other RNA
  modified_base 1: mod_base = OTHER; note = 2'-O-methyl modified nucleotide with phosphorothioate linkage
  modified_base 2: mod_base = OTHER; note = 2'-O-methyl modified nucleotide with phosphorothioate linkage
  modified_base 3: mod_base = OTHER; note = 2'-O-methyl modified nucleotide with phosphorothioate linkage
  modified_base 43: mod_base = OTHER; note = Nucleotide with phosphorothioate linkage
  modified_base 44: mod_base = OTHER; note = 2'-O-methyl modified nucleotide with phosphorothioate linkage
  modified_base 45: mod_base = OTHER; note = 2'-O-methyl modified nucleotide with phosphorothioate linkage
  modified_base 46: mod_base = OTHER; note = 2'-O-methyl modified nucleotide

SEQ ID NO: 1045 - RNA, 46 nt, synthetic construct; identical to SEQ ID NO: 652
  source 1..46: mol_type = other RNA
  modified_base 1: mod_base = OTHER; note = 2'-O-methyl modified nucleotide with phosphorothioate linkage
  modified_base 2: mod_base = OTHER; note = 2'-O-methyl modified nucleotide with phosphorothioate linkage
  modified_base 3: mod_base = OTHER; note = 2'-O-methyl modified nucleotide with phosphorothioate linkage
  modified_base 43: mod_base = OTHER; note = Nucleotide with phosphorothioate linkage
  modified_base 44: mod_base = OTHER; note = 2'-O-methyl modified nucleotide with phosphorothioate linkage
  modified_base 45: mod_base = OTHER; note = 2'-O-methyl modified nucleotide with phosphorothioate linkage
  modified_base 46: mod_base = OTHER; note = 2'-O-methyl modified nucleotide

SEQ ID NO: 1046 - RNA, 46 nt, synthetic construct; identical to SEQ ID NO: 653
  source 1..46: mol_type = other RNA
  modified_base 1: mod_base = OTHER; note = 2'-O-methyl modified nucleotide with phosphorothioate linkage
  modified_base 2: mod_base = OTHER; note = 2'-O-methyl modified nucleotide with phosphorothioate linkage
  modified_base 3: mod_base = OTHER; note = 2'-O-methyl modified nucleotide with phosphorothioate linkage
  modified_base 43: mod_base = OTHER; note = Nucleotide with phosphorothioate linkage
  modified_base 44: mod_base = OTHER; note = 2'-O-methyl modified nucleotide with phosphorothioate linkage
  modified_base 45: mod_base = OTHER; note = 2'-O-methyl modified nucleotide with phosphorothioate linkage
  modified_base 46: mod_base = OTHER; note = 2'-O-methyl modified nucleotide

SEQ ID NO: 1047 - RNA, 46 nt, synthetic construct; identical to SEQ ID NO: 654
  source 1..46: mol_type = other RNA
  modified_base 1: mod_base = OTHER; note = 2'-O-methyl modified nucleotide with phosphorothioate linkage
  modified_base 2: mod_base = OTHER; note = 2'-O-methyl modified nucleotide with phosphorothioate linkage
  modified_base 3: mod_base = OTHER; note = 2'-O-methyl modified nucleotide with phosphorothioate linkage
  modified_base 43: mod_base = OTHER; note = Nucleotide with phosphorothioate linkage
  modified_base 44: mod_base = OTHER; note = 2'-O-methyl modified nucleotide with phosphorothioate linkage
  modified_base 45: mod_base = OTHER; note = 2'-O-methyl modified nucleotide with phosphorothioate linkage
  modified_base 46: mod_base = OTHER; note = 2'-O-methyl modified nucleotide

SEQ ID NO: 1048 - RNA, 41 nt, synthetic construct; identical to SEQ ID NO: 655
  source 1..41: mol_type = other RNA
  modified_base 1: mod_base = OTHER; note = 2'-O-methyl modified nucleotide with phosphorothioate linkage
  modified_base 2: mod_base = OTHER; note = 2'-O-methyl modified nucleotide with phosphorothioate linkage
  modified_base 3: mod_base = OTHER; note = 2'-O-methyl modified nucleotide with phosphorothioate linkage
  modified_base 38: mod_base = OTHER; note = Nucleotide with phosphorothioate linkage
  modified_base 39: mod_base = OTHER; note = 2'-O-methyl modified nucleotide with phosphorothioate linkage
  modified_base 40: mod_base = OTHER; note = 2'-O-methyl modified nucleotide with phosphorothioate linkage
  modified_base 41: mod_base = OTHER; note = 2'-O-methyl modified nucleotide

SEQ ID NO: 1049 - RNA, 40 nt, synthetic construct; identical to SEQ ID NO: 656
  source 1..40: mol_type = other RNA
  modified_base 1: mod_base = OTHER; note = 2'-O-methyl modified nucleotide with phosphorothioate linkage
  modified_base 2: mod_base = OTHER; note = 2'-O-methyl modified nucleotide with phosphorothioate linkage
  modified_base 3: mod_base = OTHER; note = 2'-O-methyl modified nucleotide with phosphorothioate linkage
  modified_base 37: mod_base = OTHER; note = Nucleotide with phosphorothioate linkage
  modified_base 38: mod_base = OTHER; note = 2'-O-methyl modified nucleotide with phosphorothioate linkage
  modified_base 39: mod_base = OTHER; note = 2'-O-methyl modified nucleotide with phosphorothioate linkage
  modified_base 40: mod_base = OTHER; note = 2'-O-methyl modified nucleotide

SEQ ID NO: 1050 - RNA, 38 nt, synthetic construct; identical to SEQ ID NO: 657
  source 1..38: mol_type = other RNA
  modified_base 1: mod_base = OTHER; note = 2'-O-methyl modified nucleotide with phosphorothioate linkage
  modified_base 2: mod_base = OTHER; note = 2'-O-methyl modified nucleotide with phosphorothioate linkage
  modified_base 3: mod_base = OTHER; note = 2'-O-methyl modified nucleotide with phosphorothioate linkage
  modified_base 35: mod_base = OTHER; note = Nucleotide with phosphorothioate linkage
  modified_base 36: mod_base = OTHER; note = 2'-O-methyl modified nucleotide with phosphorothioate linkage
  modified_base 37: mod_base = OTHER; note = 2'-O-methyl modified nucleotide with phosphorothioate linkage
  modified_base 38: mod_base = OTHER; note = 2'-O-methyl modified nucleotide

SEQ ID NO: 1051 - RNA, 41 nt, synthetic construct; identical to SEQ ID NO: 658
  source 1..41: mol_type = other RNA
  modified_base 1: mod_base = OTHER; note = 2'-O-methyl modified nucleotide with phosphorothioate linkage
  modified_base 2: mod_base = OTHER; note = 2'-O-methyl modified nucleotide with phosphorothioate linkage
  modified_base 3: mod_base = OTHER; note = 2'-O-methyl modified nucleotide with phosphorothioate linkage
  modified_base 38: mod_base = OTHER; note = Nucleotide with phosphorothioate linkage
  modified_base 39: mod_base = OTHER; note = 2'-O-methyl modified nucleotide with phosphorothioate linkage
  modified_base 40: mod_base = OTHER; note = 2'-O-methyl modified nucleotide with phosphorothioate linkage
  modified_base 41: mod_base = OTHER; note = 2'-O-methyl modified nucleotide

SEQ ID NO: 1052 - RNA, 40 nt, synthetic construct; identical to SEQ ID NO: 659
  source 1..40: mol_type = other RNA
  modified_base 1: mod_base = OTHER; note = 2'-O-methyl modified nucleotide with phosphorothioate linkage
  modified_base 2: mod_base = OTHER; note = 2'-O-methyl modified nucleotide with phosphorothioate linkage
  modified_base 3: mod_base = OTHER; note = 2'-O-methyl modified nucleotide with phosphorothioate linkage
  modified_base 37: mod_base = OTHER; note = Nucleotide with phosphorothioate linkage
  modified_base 38: mod_base = OTHER; note = 2'-O-methyl modified nucleotide with phosphorothioate linkage
  modified_base 39: mod_base = OTHER; note = 2'-O-methyl modified nucleotide with phosphorothioate linkage
  modified_base 40: mod_base = OTHER; note = 2'-O-methyl modified nucleotide

SEQ ID NO: 1053 - RNA, 38 nt, synthetic construct; identical to SEQ ID NO: 660
  source 1..38: mol_type = other RNA
  modified_base 1: mod_base = OTHER; note = 2'-O-methyl modified nucleotide with phosphorothioate linkage
  modified_base 2: mod_base = OTHER; note = 2'-O-methyl modified nucleotide with phosphorothioate linkage
  modified_base 3: mod_base = OTHER; note = 2'-O-methyl modified nucleotide with phosphorothioate linkage
  modified_base 35: mod_base = OTHER; note = Nucleotide with phosphorothioate linkage
  modified_base 36: mod_base = OTHER; note = 2'-O-methyl modified nucleotide with phosphorothioate linkage
  modified_base 37: mod_base = OTHER; note = 2'-O-methyl modified nucleotide with phosphorothioate linkage
  modified_base 38: mod_base = OTHER; note = 2'-O-methyl modified nucleotide

SEQ ID NO: 1054 - RNA, 41 nt, synthetic construct; identical to SEQ ID NO: 661
  source 1..41: mol_type = other RNA
  modified_base 1: mod_base = OTHER; note = 2'-O-methyl modified nucleotide with phosphorothioate linkage
  modified_base 2: mod_base = OTHER; note = 2'-O-methyl modified nucleotide with phosphorothioate linkage
  modified_base 3: mod_base = OTHER; note = 2'-O-methyl modified nucleotide with phosphorothioate linkage
  modified_base 38: mod_base = OTHER; note = Nucleotide with phosphorothioate linkage
  modified_base 39: mod_base = OTHER; note = 2'-O-methyl modified nucleotide with phosphorothioate linkage
  modified_base 40: mod_base = OTHER; note = 2'-O-methyl modified nucleotide with phosphorothioate linkage
  modified_base 41: mod_base = OTHER; note = 2'-O-methyl modified nucleotide

SEQ ID NO: 1055 - RNA, 40 nt, synthetic construct; identical to SEQ ID NO: 662
  source 1..40: mol_type = other RNA
  modified_base 1: mod_base = OTHER; note = 2'-O-methyl modified nucleotide with phosphorothioate linkage
  modified_base 2: mod_base = OTHER; note = 2'-O-methyl modified nucleotide with phosphorothioate linkage
  modified_base 3: mod_base = OTHER; note = 2'-O-methyl modified nucleotide with phosphorothioate linkage
  modified_base 37: mod_base = OTHER; note = Nucleotide with phosphorothioate linkage
  modified_base 38: mod_base = OTHER; note = 2'-O-methyl modified nucleotide with phosphorothioate linkage
  modified_base 39: mod_base = OTHER; note = 2'-O-methyl modified nucleotide with phosphorothioate linkage
  modified_base 40: mod_base = OTHER; note = 2'-O-methyl modified nucleotide

SEQ ID NO: 1056 - RNA, 39 nt, synthetic construct; identical to SEQ ID NO: 663
  source 1..39: mol_type = other RNA
  modified_base 1: mod_base = OTHER; note = 2'-O-methyl modified nucleotide with phosphorothioate linkage
  modified_base 2: mod_base = OTHER; note = 2'-O-methyl modified nucleotide with phosphorothioate linkage
  modified_base 3: mod_base = OTHER; note = 2'-O-methyl modified nucleotide with phosphorothioate linkage
  modified_base 36: mod_base = OTHER; note = Nucleotide with phosphorothioate linkage
  modified_base 37: mod_base = OTHER; note = 2'-O-methyl modified nucleotide with phosphorothioate linkage
  modified_base 38: mod_base = OTHER; note = 2'-O-methyl modified nucleotide with phosphorothioate linkage
  modified_base 39: mod_base = OTHER; note = 2'-O-methyl modified nucleotide

SEQ ID NO: 1057 - RNA, 38 nt, synthetic construct; identical to SEQ ID NO: 664
  source 1..38: mol_type = other RNA
  modified_base 1: mod_base = OTHER; note = 2'-O-methyl modified nucleotide with phosphorothioate linkage
  modified_base 2: mod_base = OTHER; note = 2'-O-methyl modified nucleotide with phosphorothioate linkage
  modified_base 3: mod_base = OTHER; note = 2'-O-methyl modified nucleotide with phosphorothioate linkage
  modified_base 35: mod_base = OTHER; note = Nucleotide with phosphorothioate linkage
  modified_base 36: mod_base = OTHER; note = 2'-O-methyl modified nucleotide with phosphorothioate linkage
  modified_base 37: mod_base = OTHER; note = 2'-O-methyl modified nucleotide with phosphorothioate linkage
  modified_base 38: mod_base = OTHER; note = 2'-O-methyl modified nucleotide

SEQ ID NO: 1058 - RNA, 41 nt, synthetic construct; identical to SEQ ID NO: 665
  source 1..41: mol_type = other RNA
  modified_base 1: mod_base = OTHER; note = 2'-O-methyl modified nucleotide with phosphorothioate linkage
  modified_base 2: mod_base = OTHER; note = 2'-O-methyl modified nucleotide with phosphorothioate linkage
  modified_base 3: mod_base = OTHER; note = 2'-O-methyl modified nucleotide with phosphorothioate linkage
  modified_base 38: mod_base = OTHER; note = Nucleotide with phosphorothioate linkage
  modified_base 39: mod_base = OTHER; note = 2'-O-methyl modified nucleotide with phosphorothioate linkage
  modified_base 40: mod_base = OTHER; note = 2'-O-methyl modified nucleotide with phosphorothioate linkage
  modified_base 41: mod_base = OTHER; note = 2'-O-methyl modified nucleotide

SEQ ID NO: 1059 - RNA, 40 nt, synthetic construct; identical to SEQ ID NO: 666
  source 1..40: mol_type = other RNA
  modified_base 1: mod_base = OTHER; note = 2'-O-methyl modified nucleotide with phosphorothioate linkage
  modified_base 2: mod_base = OTHER; note = 2'-O-methyl modified nucleotide with phosphorothioate linkage
  modified_base 3: mod_base = OTHER; note = 2'-O-methyl modified nucleotide with phosphorothioate linkage
  modified_base 37: mod_base = OTHER; note = Nucleotide with phosphorothioate linkage
  modified_base 38: mod_base = OTHER; note = 2'-O-methyl modified nucleotide with phosphorothioate linkage
  modified_base 39: mod_base = OTHER; note = 2'-O-methyl modified nucleotide with phosphorothioate linkage
  modified_base 40: mod_base = OTHER; note = 2'-O-methyl modified nucleotide

SEQ ID NO: 1060 - RNA, 38 nt, synthetic construct; identical to SEQ ID NO: 667
  source 1..38: mol_type = other RNA
  modified_base 1: mod_base = OTHER; note = 2'-O-methyl modified nucleotide with phosphorothioate linkage
  modified_base 2: mod_base = OTHER; note = 2'-O-methyl modified nucleotide with phosphorothioate linkage
  modified_base 3: mod_base = OTHER; note = 2'-O-methyl modified nucleotide with phosphorothioate linkage
  modified_base 35: mod_base = OTHER; note = Nucleotide with phosphorothioate linkage
  modified_base 36: mod_base = OTHER; note = 2'-O-methyl modified nucleotide with phosphorothioate linkage
  modified_base 37: mod_base = OTHER; note = 2'-O-methyl modified nucleotide with phosphorothioate linkage
  modified_base 38: mod_base = OTHER; note = 2'-O-methyl modified nucleotide

SEQ ID NO: 1061 - RNA, 37 nt, synthetic construct; identical to SEQ ID NO: 668
  source 1..37: mol_type = other RNA
  modified_base 1: mod_base = OTHER; note = 2'-O-methyl modified nucleotide with phosphorothioate linkage
  modified_base 2: mod_base = OTHER; note = 2'-O-methyl modified nucleotide with phosphorothioate linkage
  modified_base 3: mod_base = OTHER; note = 2'-O-methyl modified nucleotide with phosphorothioate linkage
  modified_base 34: mod_base = OTHER; note = Nucleotide with phosphorothioate linkage
  modified_base 35: mod_base = OTHER; note = 2'-O-methyl modified nucleotide with phosphorothioate linkage
  modified_base 36: mod_base = OTHER; note = 2'-O-methyl modified nucleotide with phosphorothioate linkage
  modified_base 37: mod_base = OTHER; note = 2'-O-methyl modified nucleotide

SEQ ID NO: 1062 - RNA, 40 nt, synthetic construct; identical to SEQ ID NO: 669
  source 1..40: mol_type = other RNA
  modified_base 1: mod_base = OTHER; note = 2'-O-methyl modified nucleotide with phosphorothioate linkage
  modified_base 2: mod_base = OTHER; note = 2'-O-methyl modified nucleotide with phosphorothioate linkage
  modified_base 3: mod_base = OTHER; note = 2'-O-methyl modified nucleotide with phosphorothioate linkage
  modified_base 37: mod_base = OTHER; note = Nucleotide with phosphorothioate linkage
  modified_base 38: mod_base = OTHER; note = 2'-O-methyl modified nucleotide with phosphorothioate linkage
  modified_base 39: mod_base = OTHER; note = 2'-O-methyl modified nucleotide with phosphorothioate linkage
  modified_base 40: mod_base = OTHER; note = 2'-O-methyl modified nucleotide

SEQ ID NO: 1063 - RNA, 39 nt, synthetic construct; identical to SEQ ID NO: 670
  source 1..39: mol_type = other RNA
  modified_base 1: mod_base = OTHER; note = 2'-O-methyl modified nucleotide with phosphorothioate linkage
  modified_base 2: mod_base = OTHER; note = 2'-O-methyl modified nucleotide with phosphorothioate linkage
  modified_base 3: mod_base = OTHER; note = 2'-O-methyl modified nucleotide with phosphorothioate linkage
  modified_base 36: mod_base = OTHER; note = Nucleotide with phosphorothioate linkage
  modified_base 37: mod_base = OTHER; note = 2'-O-methyl modified nucleotide with phosphorothioate linkage
  modified_base 38: mod_base = OTHER; note = 2'-O-methyl modified nucleotide with phosphorothioate linkage
  modified_base 39: mod_base = OTHER; note = 2'-O-methyl modified nucleotide

SEQ ID NO: 1064 - RNA, 38 nt, synthetic construct; identical to SEQ ID NO: 671
  source 1..38: mol_type = other RNA
  modified_base 1: mod_base = OTHER; note = 2'-O-methyl modified nucleotide with phosphorothioate linkage
  modified_base 2: mod_base = OTHER; note = 2'-O-methyl modified nucleotide with phosphorothioate linkage
  modified_base 3: mod_base = OTHER; note = 2'-O-methyl modified nucleotide with phosphorothioate linkage
  modified_base 35: mod_base = OTHER; note = Nucleotide with phosphorothioate linkage
  modified_base 36: mod_base = OTHER; note = 2'-O-methyl modified nucleotide with phosphorothioate linkage
  modified_base 37: mod_base = OTHER; note = 2'-O-methyl modified nucleotide with phosphorothioate linkage
  modified_base 38: mod_base = OTHER; note = 2'-O-methyl modified nucleotide

SEQ ID NO: 1065 - RNA, 40 nt, synthetic construct; identical to SEQ ID NO: 672
  source 1..40: mol_type = other RNA
  modified_base 1: mod_base = OTHER; note = 2'-O-methyl modified nucleotide with phosphorothioate linkage
  modified_base 2: mod_base = OTHER; note = 2'-O-methyl modified nucleotide with phosphorothioate linkage
  modified_base 3: mod_base = OTHER; note = 2'-O-methyl modified nucleotide with phosphorothioate linkage
  modified_base 37: mod_base = OTHER; note = Nucleotide with phosphorothioate linkage
  modified_base 38: mod_base = OTHER; note = 2'-O-methyl modified nucleotide with phosphorothioate linkage
  modified_base 39: mod_base = OTHER; note = 2'-O-methyl modified nucleotide with phosphorothioate linkage
  modified_base 40: mod_base = OTHER; note = 2'-O-methyl modified nucleotide

SEQ ID NO: 1066 - RNA, 39 nt, synthetic construct; identical to SEQ ID NO: 673
  source 1..39: mol_type = other RNA
  modified_base 1: mod_base = OTHER; note = 2'-O-methyl modified nucleotide with phosphorothioate linkage
  modified_base 2: mod_base = OTHER; note = 2'-O-methyl modified nucleotide with phosphorothioate linkage
  modified_base 3: mod_base = OTHER; note = 2'-O-methyl modified nucleotide with phosphorothioate linkage
  modified_base 36: mod_base = OTHER; note = Nucleotide with phosphorothioate linkage
  modified_base 37: mod_base = OTHER; note = 2'-O-methyl modified nucleotide with phosphorothioate linkage
  modified_base 38: mod_base = OTHER; note = 2'-O-methyl modified nucleotide with phosphorothioate linkage
  modified_base 39: mod_base = OTHER; note = 2'-O-methyl modified nucleotide

SEQ ID NO: 1067 - RNA, 38 nt, synthetic construct; identical to SEQ ID NO: 674
  source 1..38: mol_type = other RNA
  modified_base 1: mod_base = OTHER; note = 2'-O-methyl modified nucleotide with phosphorothioate linkage
  modified_base 2: mod_base = OTHER; note = 2'-O-methyl modified nucleotide with phosphorothioate linkage
  modified_base 3: mod_base = OTHER; note = 2'-O-methyl modified nucleotide with phosphorothioate linkage
  modified_base 35: mod_base = OTHER; note = Nucleotide with phosphorothioate linkage
  modified_base 36: mod_base = OTHER; note = 2'-O-methyl modified nucleotide with phosphorothioate linkage
  modified_base 37: mod_base = OTHER; note = 2'-O-methyl modified nucleotide with phosphorothioate linkage
  modified_base 38: mod_base = OTHER; note = 2'-O-methyl modified nucleotide

SEQ ID NO: 1068 - RNA, 40 nt, synthetic construct; identical to SEQ ID NO: 675
  source 1..40: mol_type = other RNA
  modified_base 1: mod_base = OTHER; note = 2'-O-methyl modified nucleotide with phosphorothioate linkage
  modified_base 2: mod_base = OTHER; note = 2'-O-methyl modified nucleotide with phosphorothioate linkage
  modified_base 3: mod_base = OTHER; note = 2'-O-methyl modified nucleotide with phosphorothioate linkage
  modified_base 37: mod_base = OTHER; note = Nucleotide with phosphorothioate linkage
  modified_base 38: mod_base = OTHER; note = 2'-O-methyl modified nucleotide with phosphorothioate linkage
  modified_base 39: mod_base = OTHER; note = 2'-O-methyl modified nucleotide with phosphorothioate linkage
  modified_base 40: mod_base = OTHER; note = 2'-O-methyl modified nucleotide

SEQ ID NO: 1069 - RNA, 39 nt, synthetic construct; identical to SEQ ID NO: 676
  source 1..39: mol_type = other RNA
  modified_base 1: mod_base = OTHER; note = 2'-O-methyl modified nucleotide with phosphorothioate linkage
  modified_base 2: mod_base = OTHER; note = 2'-O-methyl modified nucleotide with phosphorothioate linkage
  modified_base 3: mod_base = OTHER; note = 2'-O-methyl modified nucleotide with phosphorothioate linkage
  modified_base 36: mod_base = OTHER; note = Nucleotide with phosphorothioate linkage
  modified_base 37: mod_base = OTHER; note = 2'-O-methyl modified nucleotide with phosphorothioate linkage
  modified_base 38: mod_base = OTHER; note = 2'-O-methyl modified nucleotide with phosphorothioate linkage
  modified_base 39: mod_base = OTHER; note = 2'-O-methyl modified nucleotide

SEQ ID NO: 1070 - RNA, 38 nt, synthetic construct; identical to SEQ ID NO: 577
  source 1..38: mol_type = other RNA
  modified_base 1: mod_base = OTHER; note = 2'-O-methyl modified nucleotide with phosphorothioate linkage
  modified_base 2: mod_base = OTHER; note = 2'-O-methyl modified nucleotide with phosphorothioate linkage
  modified_base 3: mod_base = OTHER; note = 2'-O-methyl modified nucleotide with phosphorothioate linkage
  modified_base 35: mod_base = OTHER; note = Nucleotide with phosphorothioate linkage
  modified_base 36: mod_base = OTHER; note = 2'-O-methyl modified nucleotide with phosphorothioate linkage
  modified_base 37: mod_base = OTHER; note = 2'-O-methyl modified nucleotide with phosphorothioate linkage
  modified_base 38: mod_base = OTHER; note = 2'-O-methyl modified nucleotide

SEQ ID NO: 1071 - RNA, 40 nt, synthetic construct; identical to SEQ ID NO: 678
  source 1..40: mol_type = other RNA
  modified_base 1: mod_base = OTHER; note = 2'-O-methyl modified nucleotide with phosphorothioate linkage
  modified_base 2: mod_base = OTHER; note = 2'-O-methyl modified nucleotide with phosphorothioate linkage
  modified_base 3: mod_base = OTHER; note = 2'-O-methyl modified nucleotide with phosphorothioate linkage
  modified_base 37: mod_base = OTHER; note = Nucleotide with phosphorothioate linkage
  modified_base 38: mod_base = OTHER; note = 2'-O-methyl modified nucleotide with phosphorothioate linkage
  modified_base 39: mod_base = OTHER; note = 2'-O-methyl modified nucleotide with phosphorothioate linkage
  modified_base 40: mod_base = OTHER; note = 2'-O-methyl modified nucleotide

SEQ ID NO: 1072 - RNA, 39 nt, synthetic construct; identical to SEQ ID NO: 679
  source 1..39: mol_type = other RNA
  modified_base 1: mod_base = OTHER; note = 2'-O-methyl modified nucleotide with phosphorothioate linkage
  modified_base 2: mod_base = OTHER; note = 2'-O-methyl modified nucleotide with phosphorothioate linkage
  modified_base 3: mod_base = OTHER; note = 2'-O-methyl modified nucleotide with phosphorothioate linkage
  modified_base 36: mod_base = OTHER; note = Nucleotide with phosphorothioate linkage
  modified_base 37: mod_base = OTHER; note = 2'-O-methyl modified nucleotide with phosphorothioate linkage
  modified_base 38: mod_base = OTHER; note = 2'-O-methyl modified nucleotide with phosphorothioate linkage
  modified_base 39: mod_base = OTHER; note = 2'-O-methyl modified nucleotide

SEQ ID NO: 1073 - RNA, 38 nt, synthetic construct; identical to SEQ ID NO: 680
  source 1..38: mol_type = other RNA
  modified_base 1: mod_base = OTHER; note = 2'-O-methyl modified nucleotide with phosphorothioate linkage
  modified_base 2: mod_base = OTHER; note = 2'-O-methyl modified nucleotide with phosphorothioate linkage
  modified_base 3: mod_base = OTHER; note = 2'-O-methyl modified nucleotide with phosphorothioate linkage
  modified_base 35: mod_base = OTHER; note = Nucleotide with phosphorothioate linkage
  modified_base 36: mod_base = OTHER; note = 2'-O-methyl modified nucleotide with phosphorothioate linkage
  modified_base 37: mod_base = OTHER; note = 2'-O-methyl modified nucleotide with phosphorothioate linkage
  modified_base 38: mod_base = OTHER; note = 2'-O-methyl modified nucleotide

SEQ ID NO: 1074 - RNA, 41 nt, synthetic construct; identical to SEQ ID NO: 681
  source 1..41: mol_type = other RNA
  modified_base 1: mod_base = OTHER; note = 2'-O-methyl modified nucleotide with phosphorothioate linkage
  modified_base 2: mod_base = OTHER; note = 2'-O-methyl modified nucleotide with phosphorothioate linkage
  modified_base 3: mod_base = OTHER; note = 2'-O-methyl modified nucleotide with phosphorothioate linkage
  modified_base 38: mod_base = OTHER; note = Nucleotide with phosphorothioate linkage
  modified_base 39: mod_base = OTHER; note = 2'-O-methyl modified nucleotide with phosphorothioate linkage
  modified_base 40: mod_base = OTHER; note = 2'-O-methyl modified nucleotide with phosphorothioate linkage
  modified_base 41: mod_base = OTHER; note = 2'-O-methyl modified nucleotide

SEQ ID NO: 1075 - RNA, 40 nt, synthetic construct; identical to SEQ ID NO: 682
  source 1..40: mol_type = other RNA
  modified_base 1: mod_base = OTHER; note = 2'-O-methyl modified nucleotide with phosphorothioate linkage
  modified_base 2: mod_base = OTHER; note = 2'-O-methyl modified nucleotide with phosphorothioate linkage
  modified_base 3: mod_base = OTHER; note = 2'-O-methyl modified nucleotide with phosphorothioate linkage
  modified_base 37: mod_base = OTHER; note = Nucleotide with phosphorothioate linkage
  modified_base 38: mod_base = OTHER; note = 2'-O-methyl modified nucleotide with phosphorothioate linkage
  modified_base 39: mod_base = OTHER; note = 2'-O-methyl modified nucleotide with phosphorothioate linkage
  modified_base 40: mod_base = OTHER; note = 2'-O-methyl modified nucleotide

SEQ ID NO: 1076 - RNA, 37 nt, synthetic construct; identical to SEQ ID NO: 683
  source 1..37: mol_type = other RNA
  modified_base 1: mod_base = OTHER; note = 2'-O-methyl modified nucleotide with phosphorothioate linkage
  modified_base 2: mod_base = OTHER; note = 2'-O-methyl modified nucleotide with phosphorothioate linkage
  modified_base 3: mod_base = OTHER; note = 2'-O-methyl modified nucleotide with phosphorothioate linkage
  modified_base 34: mod_base = OTHER; note = Nucleotide with phosphorothioate linkage
  modified_base 35: mod_base = OTHER; note = 2'-O-methyl modified nucleotide with phosphorothioate linkage
  modified_base 36: mod_base = OTHER; note = 2'-O-methyl modified nucleotide with phosphorothioate linkage
  modified_base 37: mod_base = OTHER; note = 2'-O-methyl modified nucleotide

SEQ ID NO: 1077 - RNA, 36 nt, synthetic construct; identical to SEQ ID NO: 684
  source 1..36: mol_type = other RNA
  modified_base 1: mod_base = OTHER; note = 2'-O-methyl modified nucleotide with phosphorothioate linkage
  modified_base 2: mod_base = OTHER; note = 2'-O-methyl modified nucleotide with phosphorothioate linkage
  modified_base 3: mod_base = OTHER; note = 2'-O-methyl modified nucleotide with phosphorothioate linkage
  modified_base 33: mod_base = OTHER; note = Nucleotide with phosphorothioate linkage
  modified_base 34: mod_base = OTHER; note = 2'-O-methyl modified nucleotide with phosphorothioate linkage
  modified_base 35: mod_base = OTHER; note = 2'-O-methyl modified nucleotide with phosphorothioate linkage
  modified_base 36: mod_base = OTHER; note = 2'-O-methyl modified nucleotide

SEQ ID NO: 1078 - RNA, 37 nt, synthetic construct; identical to SEQ ID NO: 621
  source 1..37: mol_type = other RNA
  modified_base 1: mod_base = OTHER; note = 2'-O-methyl modified nucleotide with phosphorothioate linkage
  modified_base 2: mod_base = OTHER; note = 2'-O-methyl modified nucleotide with phosphorothioate linkage
  modified_base 3: mod_base = OTHER; note = 2'-O-methyl modified nucleotide with phosphorothioate linkage
  modified_base 34: mod_base = OTHER; note = Nucleotide with phosphorothioate linkage
  modified_base 35: mod_base = OTHER; note = 2'-O-methyl modified nucleotide with phosphorothioate linkage
  modified_base 36: mod_base = OTHER; note = 2'-O-methyl modified nucleotide with phosphorothioate linkage
  modified_base 37: mod_base = OTHER; note = 2'-O-methyl modified nucleotide

SEQ ID NO: 1079 - RNA, 36 nt, synthetic construct; identical to SEQ ID NO: 686
  source 1..36: mol_type = other RNA
  modified_base 1: mod_base = OTHER; note = 2'-O-methyl modified nucleotide with phosphorothioate linkage
  modified_base 2: mod_base = OTHER; note = 2'-O-methyl modified nucleotide with phosphorothioate linkage
  modified_base 3: mod_base = OTHER; note = 2'-O-methyl modified nucleotide with phosphorothioate linkage
  modified_base 33: mod_base = OTHER; note = Nucleotide with phosphorothioate linkage
  modified_base 34: mod_base = OTHER; note = 2'-O-methyl modified nucleotide with phosphorothioate linkage
  modified_base 35: mod_base = OTHER; note = 2'-O-methyl modified nucleotide with phosphorothioate linkage
  modified_base 36: mod_base = OTHER; note = 2'-O-methyl modified nucleotide

SEQ ID NO: 1080 - RNA, 37 nt, synthetic construct; identical to SEQ ID NO: 622
  source 1..37: mol_type = other RNA
  modified_base 1: mod_base = OTHER; note = 2'-O-methyl modified nucleotide with phosphorothioate linkage
  modified_base 2: mod_base = OTHER; note = 2'-O-methyl modified nucleotide with phosphorothioate linkage
  modified_base 3: mod_base = OTHER; note = 2'-O-methyl modified nucleotide with phosphorothioate linkage
  modified_base 34: mod_base = OTHER; note = Nucleotide with phosphorothioate linkage
  modified_base 35: mod_base = OTHER; note = 2'-O-methyl modified nucleotide with phosphorothioate linkage
  modified_base 36: mod_base = OTHER; note = 2'-O-methyl modified nucleotide with phosphorothioate linkage
  modified_base 37: mod_base = OTHER; note = 2'-O-methyl modified nucleotide

SEQ ID NO: 1081 - RNA, 36 nt, synthetic construct; identical to SEQ ID NO: 688
  source 1..36: mol_type = other RNA
  modified_base 1: mod_base = OTHER; note = 2'-O-methyl modified nucleotide with phosphorothioate linkage
  modified_base 2: mod_base = OTHER; note = 2'-O-methyl modified nucleotide with phosphorothioate linkage
  modified_base 3: mod_base = OTHER; note = 2'-O-methyl modified nucleotide with phosphorothioate linkage
  modified_base 33: mod_base = OTHER; note = Nucleotide with phosphorothioate linkage
  modified_base 34: mod_base = OTHER; note = 2'-O-methyl modified nucleotide with phosphorothioate linkage
  modified_base 35: mod_base = OTHER; note = 2'-O-methyl modified nucleotide with phosphorothioate linkage
  modified_base 36: mod_base = OTHER; note = 2'-O-methyl modified nucleotide

SEQ ID NO: 1082 - RNA, 37 nt, synthetic construct; identical to SEQ ID NO: 668
  source 1..37: mol_type = other RNA
  modified_base 1: mod_base = OTHER; note = 2'-O-methyl modified nucleotide with phosphorothioate linkage
  modified_base 2: mod_base = OTHER; note = 2'-O-methyl modified nucleotide with phosphorothioate linkage
  modified_base 3: mod_base = OTHER; note = 2'-O-methyl modified nucleotide with phosphorothioate linkage
  modified_base 34: mod_base = OTHER; note = Nucleotide with phosphorothioate linkage
  modified_base 35: mod_base = OTHER; note = 2'-O-methyl modified nucleotide with phosphorothioate linkage
  modified_base 36: mod_base = OTHER; note = 2'-O-methyl modified nucleotide with phosphorothioate linkage
  modified_base 37: mod_base = OTHER; note = 2'-O-methyl modified nucleotide

SEQ ID NO: 1083 - RNA, 36 nt, synthetic construct; identical to SEQ ID NO: 690
  source 1..36: mol_type = other RNA
  modified_base 1: mod_base = OTHER; note = 2'-O-methyl modified nucleotide with phosphorothioate linkage
  modified_base 2: mod_base = OTHER; note = 2'-O-methyl modified nucleotide with phosphorothioate linkage
  modified_base 3: mod_base = OTHER; note = 2'-O-methyl modified nucleotide with phosphorothioate linkage
  modified_base 33: mod_base = OTHER; note = Nucleotide with phosphorothioate linkage
  modified_base 34: mod_base = OTHER; note = 2'-O-methyl modified nucleotide with phosphorothioate linkage
  modified_base 35: mod_base = OTHER; note = 2'-O-methyl modified nucleotide with phosphorothioate linkage
  modified_base 36: mod_base = OTHER; note = 2'-O-methyl modified nucleotide

SEQ ID NO: 1084 - RNA, 37 nt, synthetic construct; identical to SEQ ID NO: 623
  source 1..37: mol_type = other RNA
  modified_base 1: mod_base = OTHER; note = 2'-O-methyl modified nucleotide with phosphorothioate linkage
  modified_base 2: mod_base = OTHER; note = 2'-O-methyl modified nucleotide with phosphorothioate linkage
  modified_base 3: mod_base = OTHER; note = 2'-O-methyl modified nucleotide with phosphorothioate linkage
  modified_base 34: mod_base = OTHER; note = Nucleotide with phosphorothioate linkage
  modified_base 35: mod_base = OTHER; note = 2'-O-methyl modified nucleotide with phosphorothioate linkage
  modified_base 36: mod_base = OTHER; note = 2'-O-methyl modified nucleotide with phosphorothioate linkage
  modified_base 37: mod_base = OTHER; note = 2'-O-methyl modified nucleotide

SEQ ID NO: 1085 - RNA, 36 nt, synthetic construct; identical to SEQ ID NO: 692
  source 1..36: mol_type = other RNA
  modified_base 1: mod_base = OTHER; note = 2'-O-methyl modified nucleotide with phosphorothioate linkage
  modified_base 2: mod_base = OTHER; note = 2'-O-methyl modified nucleotide with phosphorothioate linkage
  modified_base 3: mod_base = OTHER; note = 2'-O-methyl modified nucleotide with phosphorothioate linkage
  modified_base 33: mod_base = OTHER; note = Nucleotide with phosphorothioate linkage
  modified_base 34: mod_base = OTHER; note = 2'-O-methyl modified nucleotide with phosphorothioate linkage
  modified_base 35: mod_base = OTHER; note = 2'-O-methyl modified nucleotide with phosphorothioate linkage
  modified_base 36: mod_base = OTHER; note = 2'-O-methyl modified nucleotide

SEQ ID NO: 1086 - RNA, 117 nt, synthetic construct; identical to SEQ ID NO: 693
  source 1..117: mol_type = other RNA
  modified_base 1: mod_base = OTHER; note = 2'-O-methyl modified nucleotide with phosphorothioate linkage
  modified_base 2: mod_base = OTHER; note = 2'-O-methyl modified nucleotide with phosphorothioate linkage
  modified_base 3: mod_base = OTHER; note = 2'-O-methyl modified nucleotide with phosphorothioate linkage
  modified_base 114: mod_base = OTHER; note = Nucleotide with phosphorothioate linkage
  modified_base 115: mod_base = OTHER; note = 2'-O-methyl modified nucleotide with phosphorothioate linkage
  modified_base 116: mod_base = OTHER; note = 2'-O-methyl modified nucleotide with phosphorothioate linkage
  modified_base 117: mod_base = OTHER; note = 2'-O-methyl modified nucleotide

SEQ ID NO: 1087 - RNA, 117 nt, synthetic construct; identical to SEQ ID NO: 694
  source 1..117: mol_type = other RNA
  modified_base 1: mod_base = OTHER; note = 2'-O-methyl modified nucleotide with phosphorothioate linkage
  modified_base 2: mod_base = OTHER; note = 2'-O-methyl modified nucleotide with phosphorothioate linkage
  modified_base 3: mod_base = OTHER; note = 2'-O-methyl modified nucleotide with phosphorothioate linkage
  modified_base 114: mod_base = OTHER; note = Nucleotide with phosphorothioate linkage
  modified_base 115: mod_base = OTHER; note = 2'-O-methyl modified nucleotide with phosphorothioate linkage
  modified_base 116: mod_base = OTHER; note = 2'-O-methyl modified nucleotide with phosphorothioate linkage
  modified_base 117: mod_base = OTHER; note = 2'-O-methyl modified nucleotide

SEQ ID NO: 1088 - RNA, 117 nt, synthetic construct; identical to SEQ ID NO: 695
  source 1..117: mol_type = other RNA
  modified_base 1: mod_base = OTHER; note = 2'-O-methyl modified nucleotide with phosphorothioate linkage
  modified_base 2: mod_base = OTHER; note = 2'-O-methyl modified nucleotide with phosphorothioate linkage
  modified_base 3: mod_base = OTHER; note = 2'-O-methyl modified nucleotide with phosphorothioate linkage
  modified_base 114: mod_base = OTHER; note = Nucleotide with phosphorothioate linkage
  modified_base 115: mod_base = OTHER; note = 2'-O-methyl modified nucleotide with phosphorothioate linkage
  modified_base 116: mod_base = OTHER; note = 2'-O-methyl modified nucleotide with phosphorothioate linkage
  modified_base 117: mod_base = OTHER; note = 2'-O-methyl modified nucleotide

SEQ ID NO: 1089 - RNA, 119 nt, synthetic construct; identical to SEQ ID NO: 696
  source 1..119: mol_type = other RNA
  modified_base 1: mod_base = OTHER; note = 2'-O-methyl modified nucleotide with phosphorothioate linkage
  modified_base 2: mod_base = OTHER; note = 2'-O-methyl modified nucleotide with phosphorothioate linkage
  modified_base 3: mod_base = OTHER; note = 2'-O-methyl modified nucleotide with phosphorothioate linkage
  modified_base 116: mod_base = OTHER; note = Nucleotide with phosphorothioate linkage
  modified_base 117: mod_base = OTHER; note = 2'-O-methyl modified nucleotide with phosphorothioate linkage
  modified_base 118: mod_base = OTHER; note = 2'-O-methyl modified nucleotide with phosphorothioate linkage
  modified_base 119: mod_base = OTHER; note = 2'-O-methyl modified nucleotide

SEQ ID NO: 1090 - RNA, 117 nt, synthetic construct; identical to SEQ ID NO: 697
  source 1..117: mol_type = other RNA
  modified_base 1: mod_base = OTHER; note = 2'-O-methyl modified nucleotide with phosphorothioate linkage
  modified_base 2: mod_base = OTHER; note = 2'-O-methyl modified nucleotide with phosphorothioate linkage
  modified_base 3: mod_base = OTHER; note = 2'-O-methyl modified nucleotide with phosphorothioate linkage
  modified_base 114: mod_base = OTHER; note = Nucleotide with phosphorothioate linkage
  modified_base 115: mod_base = OTHER; note = 2'-O-methyl modified nucleotide with phosphorothioate linkage
  modified_base 116: mod_base = OTHER; note = 2'-O-methyl modified nucleotide with phosphorothioate linkage
  modified_base 117: mod_base = OTHER; note = 2'-O-methyl modified nucleotide

SEQ ID NO: 1091 - RNA, 119 nt, synthetic construct; identical to SEQ ID NO: 698
  source 1..119: mol_type = other RNA
  modified_base 1: mod_base = OTHER; note = 2'-O-methyl modified nucleotide with phosphorothioate linkage
  modified_base 2: mod_base = OTHER; note = 2'-O-methyl modified nucleotide with phosphorothioate linkage
  modified_base 3: mod_base = OTHER; note = 2'-O-methyl modified nucleotide with phosphorothioate linkage
  modified_base 116: mod_base = OTHER; note = Nucleotide with phosphorothioate linkage
  modified_base 117: mod_base = OTHER; note = 2'-O-methyl modified nucleotide with phosphorothioate linkage
  modified_base 118: mod_base = OTHER; note = 2'-O-methyl modified nucleotide with phosphorothioate linkage
  modified_base 119: mod_base = OTHER; note = 2'-O-methyl modified nucleotide

SEQ ID NO: 1092 - RNA, 130 nt, synthetic construct; identical to SEQ ID NO: 699
  source 1..130: mol_type = other RNA
  modified_base 1: mod_base = OTHER; note = 2'-O-methyl modified nucleotide with phosphorothioate linkage
  modified_base 2: mod_base = OTHER; note = 2'-O-methyl modified nucleotide with phosphorothioate linkage
  modified_base 3: mod_base = OTHER; note = 2'-O-methyl modified nucleotide with phosphorothioate linkage
  modified_base 127: mod_base = OTHER; note = Nucleotide with phosphorothioate linkage
  modified_base 128: mod_base = OTHER; note = 2'-O-methyl modified nucleotide with phosphorothioate linkage
  modified_base 129: mod_base = OTHER; note = 2'-O-methyl modified nucleotide with phosphorothioate linkage
  modified_base 130: mod_base = OTHER; note = 2'-O-methyl modified nucleotide

SEQ ID NO: 1093 - RNA, 130 nt, synthetic construct; identical to SEQ ID NO: 700
  source 1..130: mol_type = other RNA
  modified_base 1: mod_base = OTHER; note = 2'-O-methyl modified nucleotide with phosphorothioate linkage
  modified_base 2: mod_base = OTHER; note = 2'-O-methyl modified nucleotide with phosphorothioate linkage
  modified_base 3: mod_base = OTHER; note = 2'-O-methyl modified nucleotide with phosphorothioate linkage
  modified_base 127: mod_base = OTHER; note = Nucleotide with phosphorothioate linkage
  modified_base 128: mod_base = OTHER; note = 2'-O-methyl modified nucleotide with phosphorothioate linkage
  modified_base 129: mod_base = OTHER; note = 2'-O-methyl modified nucleotide with phosphorothioate linkage
  modified_base 130: mod_base = OTHER; note = 2'-O-methyl modified nucleotide

SEQ ID NO: 1094 - RNA, 130 nt, synthetic construct; identical to SEQ ID NO: 701
  source 1..130: mol_type = other RNA
  modified_base 1: mod_base = OTHER; note = 2'-O-methyl modified nucleotide with phosphorothioate linkage
  modified_base 2: mod_base = OTHER; note = 2'-O-methyl modified nucleotide with phosphorothioate linkage
  modified_base 3: mod_base = OTHER; note = 2'-O-methyl modified nucleotide with phosphorothioate linkage
  modified_base 127: mod_base = OTHER; note = Nucleotide with phosphorothioate linkage
  modified_base 128: mod_base = OTHER; note = 2'-O-methyl modified nucleotide with phosphorothioate linkage
  modified_base 129: mod_base = OTHER; note = 2'-O-methyl modified nucleotide with phosphorothioate linkage
  modified_base 130: mod_base = OTHER; note = 2'-O-methyl modified nucleotide

SEQ ID NO: 1095 - RNA, 130 nt, synthetic construct; identical to SEQ ID NO: 702
  source 1..130: mol_type = other RNA
  modified_base 1: mod_base = OTHER; note = 2'-O-methyl modified nucleotide with phosphorothioate linkage
  modified_base 2: mod_base = OTHER; note = 2'-O-methyl modified nucleotide with phosphorothioate linkage
  modified_base 3: mod_base = OTHER; note = 2'-O-methyl modified nucleotide with phosphorothioate linkage
  modified_base 127: mod_base = OTHER; note = Nucleotide with phosphorothioate linkage
  modified_base 128: mod_base = OTHER; note = 2'-O-methyl modified nucleotide with phosphorothioate linkage
  modified_base 129: mod_base = OTHER; note = 2'-O-methyl modified nucleotide with phosphorothioate linkage
  modified_base 130: mod_base = OTHER; note = 2'-O-methyl modified nucleotide

SEQ ID NO: 1096 - RNA, 130 nt, synthetic construct; identical to SEQ ID NO: 703
  source 1..130: mol_type = other RNA
  modified_base 1: mod_base = OTHER; note = 2'-O-methyl modified nucleotide with phosphorothioate linkage
  modified_base 2: mod_base = OTHER; note = 2'-O-methyl modified nucleotide with phosphorothioate linkage
  modified_base 3: mod_base = OTHER; note = 2'-O-methyl modified nucleotide with phosphorothioate linkage
  modified_base 127: mod_base = OTHER; note = Nucleotide with phosphorothioate linkage
  modified_base 128: mod_base = OTHER; note = 2'-O-methyl modified nucleotide with phosphorothioate linkage
  modified_base 129: mod_base = OTHER; note = 2'-O-methyl modified nucleotide with phosphorothioate linkage
  modified_base 130: mod_base = OTHER; note = 2'-O-methyl modified nucleotide

SEQ ID NO: 1097 - RNA, 130 nt, synthetic construct; identical to SEQ ID NO: 704
  source 1..130: mol_type = other RNA
  modified_base 1: mod_base = OTHER; note = 2'-O-methyl modified nucleotide with phosphorothioate linkage
  modified_base 2: mod_base = OTHER; note = 2'-O-methyl modified nucleotide with phosphorothioate linkage
  modified_base 3: mod_base = OTHER; note = 2'-O-methyl modified nucleotide with phosphorothioate linkage
  modified_base 127: mod_base = OTHER; note = Nucleotide with phosphorothioate linkage
  modified_base 128: mod_base = OTHER; note = 2'-O-methyl modified nucleotide with phosphorothioate linkage
  modified_base 129: mod_base = OTHER; note = 2'-O-methyl modified nucleotide with phosphorothioate linkage
  modified_base 130: mod_base = OTHER; note = 2'-O-methyl modified nucleotide

SEQ ID NO: 1098 - RNA, 130 nt, synthetic construct; identical to SEQ ID NO: 705
  source 1..130: mol_type = other RNA
  modified_base 1: mod_base = OTHER; note = 2'-O-methyl modified nucleotide with phosphorothioate linkage
  modified_base 2: mod_base = OTHER; note = 2'-O-methyl modified nucleotide with phosphorothioate linkage
  modified_base 3: mod_base = OTHER; note = 2'-O-methyl modified nucleotide with phosphorothioate linkage
  modified_base 127: mod_base = OTHER; note = Nucleotide with phosphorothioate linkage
  modified_base 128: mod_base = OTHER; note = 2'-O-methyl modified nucleotide with phosphorothioate linkage
  modified_base 129: mod_base = OTHER; note = 2'-O-methyl modified nucleotide with phosphorothioate linkage
  modified_base 130: mod_base = OTHER; note = 2'-O-methyl modified nucleotide

SEQ ID NO: 1099 - RNA, 130 nt, synthetic construct; identical to SEQ ID NO: 706
  source 1..130: mol_type = other RNA
  modified_base 1: mod_base = OTHER; note = 2'-O-methyl modified nucleotide with phosphorothioate linkage
  modified_base 2: mod_base = OTHER; note = 2'-O-methyl modified nucleotide with phosphorothioate linkage
  modified_base 3: mod_base = OTHER; note = 2'-O-methyl modified nucleotide with phosphorothioate linkage
  modified_base 127: mod_base = OTHER; note = Nucleotide with phosphorothioate linkage
  modified_base 128: mod_base = OTHER; note = 2'-O-methyl modified nucleotide with phosphorothioate linkage
  modified_base 129: mod_base = OTHER; note = 2'-O-methyl modified nucleotide with phosphorothioate linkage
  modified_base 130: mod_base = OTHER; note = 2'-O-methyl modified nucleotide

SEQ ID NO: 1100 - RNA, 130 nt, synthetic construct; identical to SEQ ID NO: 707
  source 1..130: mol_type = other RNA
  modified_base 1: mod_base = OTHER; note = 2'-O-methyl modified nucleotide with phosphorothioate linkage
  modified_base 2: mod_base = OTHER; note = 2'-O-methyl modified nucleotide with phosphorothioate linkage
  modified_base 3: mod_base = OTHER; note = 2'-O-methyl modified nucleotide with phosphorothioate linkage
  modified_base 127: mod_base = OTHER; note = Nucleotide with phosphorothioate linkage
  modified_base 128: mod_base = OTHER; note = 2'-O-methyl modified nucleotide with phosphorothioate linkage
  modified_base 129: mod_base = OTHER; note = 2'-O-methyl modified nucleotide with phosphorothioate linkage
  modified_base 130: mod_base = OTHER; note = 2'-O-methyl modified nucleotide

SEQ ID NO: 1101 - RNA, 130 nt, synthetic construct; identical to SEQ ID NO: 708
  source 1..130: mol_type = other RNA
  modified_base 1: mod_base = OTHER; note = 2'-O-methyl modified nucleotide with phosphorothioate linkage
  modified_base 2: mod_base = OTHER; note = 2'-O-methyl modified nucleotide with phosphorothioate linkage
  modified_base 3: mod_base = OTHER; note = 2'-O-methyl modified nucleotide with phosphorothioate linkage
  modified_base 127: mod_base = OTHER; note = Nucleotide with phosphorothioate linkage
  modified_base 128: mod_base = OTHER; note = 2'-O-methyl modified nucleotide with phosphorothioate linkage
  modified_base 129: mod_base = OTHER; note = 2'-O-methyl modified nucleotide with phosphorothioate linkage
  modified_base 130: mod_base = OTHER; note = 2'-O-methyl modified nucleotide

SEQ ID NO: 1102 - RNA, 130 nt, synthetic construct; identical to SEQ ID NO: 709
  source 1..130: mol_type = other RNA
  modified_base 1: mod_base = OTHER; note = 2'-O-methyl modified nucleotide with phosphorothioate linkage
  modified_base 2: mod_base = OTHER; note = 2'-O-methyl modified nucleotide with phosphorothioate linkage
  modified_base 3: mod_base = OTHER; note = 2'-O-methyl modified nucleotide with phosphorothioate linkage
  modified_base 127: mod_base = OTHER; note = Nucleotide with phosphorothioate linkage
  modified_base 128: mod_base = OTHER; note = 2'-O-methyl modified nucleotide with phosphorothioate linkage
  modified_base 129: mod_base = OTHER; note = 2'-O-methyl modified nucleotide with phosphorothioate linkage
  modified_base 130: mod_base = OTHER; note = 2'-O-methyl modified nucleotide

SEQ ID NO: 1103 - RNA, 130 nt, synthetic construct; identical to SEQ ID NO: 710
  source 1..130: mol_type = other RNA
  modified_base 1: mod_base = OTHER; note = 2'-O-methyl modified nucleotide with phosphorothioate linkage
  modified_base 2: mod_base = OTHER; note = 2'-O-methyl modified nucleotide with phosphorothioate linkage
  modified_base 3: mod_base = OTHER; note = 2'-O-methyl modified nucleotide with phosphorothioate linkage
  modified_base 127: mod_base = OTHER; note = Nucleotide with phosphorothioate linkage
  modified_base 128: mod_base = OTHER; note = 2'-O-methyl modified nucleotide with phosphorothioate linkage
  modified_base 129: mod_base = OTHER; note = 2'-O-methyl modified nucleotide with phosphorothioate linkage
  modified_base 130: mod_base = OTHER; note = 2'-O-methyl modified nucleotide

SEQ ID NO: 1104 - RNA, 130 nt, synthetic construct; identical to SEQ ID NO: 711
  source 1..130: mol_type = other RNA
  modified_base 1: mod_base = OTHER; note = 2'-O-methyl modified nucleotide with phosphorothioate linkage
  modified_base 2: mod_base = OTHER; note = 2'-O-methyl modified nucleotide with phosphorothioate linkage
  modified_base 3: mod_base = OTHER; note = 2'-O-methyl modified nucleotide with phosphorothioate linkage
  modified_base 127: mod_base = OTHER; note = Nucleotide with phosphorothioate linkage
  modified_base 128: mod_base = OTHER; note = 2'-O-methyl modified nucleotide with phosphorothioate linkage
  modified_base 129: mod_base = OTHER; note = 2'-O-methyl modified nucleotide with phosphorothioate linkage
  modified_base 130: mod_base = OTHER; note = 2'-O-methyl modified nucleotide

SEQ ID NO: 1105 - RNA, 130 nt, synthetic construct; identical to SEQ ID NO: 712
  source 1..130: mol_type = other RNA
  modified_base 1: mod_base = OTHER; note = 2'-O-methyl modified nucleotide with phosphorothioate linkage
  modified_base 2: mod_base = OTHER; note = 2'-O-methyl modified nucleotide with phosphorothioate linkage
  modified_base 3: mod_base = OTHER; note = 2'-O-methyl modified nucleotide with phosphorothioate linkage
  modified_base 127: mod_base = OTHER; note = Nucleotide with phosphorothioate linkage
  modified_base 128: mod_base = OTHER; note = 2'-O-methyl modified nucleotide with phosphorothioate linkage
  modified_base 129: mod_base = OTHER; note = 2'-O-methyl modified nucleotide with phosphorothioate linkage
  modified_base 130: mod_base = OTHER; note = 2'-O-methyl modified nucleotide

SEQ ID NO: 1106 - RNA, 130 nt, synthetic construct; identical to SEQ ID NO: 713
  source 1..130: mol_type = other RNA
  modified_base 1: mod_base = OTHER; note = 2'-O-methyl modified nucleotide with phosphorothioate linkage
  modified_base 2: mod_base = OTHER; note = 2'-O-methyl modified nucleotide with phosphorothioate linkage
  modified_base 3: mod_base = OTHER; note = 2'-O-methyl modified nucleotide with phosphorothioate linkage
  modified_base 127: mod_base = OTHER; note = Nucleotide with phosphorothioate linkage
  modified_base 128: mod_base = OTHER; note = 2'-O-methyl modified nucleotide with phosphorothioate linkage
  modified_base 129: mod_base = OTHER; note = 2'-O-methyl modified nucleotide with phosphorothioate linkage
  modified_base 130: mod_base = OTHER; note = 2'-O-methyl modified nucleotide

SEQ ID NO: 1107 - RNA, 130 nt, synthetic construct; identical to SEQ ID NO: 714
  source 1..130: mol_type = other RNA
  modified_base 1: mod_base = OTHER; note = 2'-O-methyl modified nucleotide with phosphorothioate linkage
  modified_base 2: mod_base = OTHER; note = 2'-O-methyl modified nucleotide with phosphorothioate linkage
  modified_base 3: mod_base = OTHER; note = 2'-O-methyl modified nucleotide with phosphorothioate linkage
  modified_base 127: mod_base = OTHER; note = Nucleotide with phosphorothioate linkage
  modified_base 128: mod_base = OTHER; note = 2'-O-methyl modified nucleotide with phosphorothioate linkage
  modified_base 129: mod_base = OTHER; note = 2'-O-methyl modified nucleotide with phosphorothioate linkage
  modified_base 130: mod_base = OTHER; note = 2'-O-methyl modified nucleotide

SEQ ID NO: 1108 - RNA, 130 nt, synthetic construct; identical to SEQ ID NO: 715
  source 1..130: mol_type = other RNA
  modified_base 1: mod_base = OTHER; note = 2'-O-methyl modified nucleotide with phosphorothioate linkage
  modified_base 2: mod_base = OTHER; note = 2'-O-methyl modified nucleotide with phosphorothioate linkage
  modified_base 3: mod_base = OTHER; note = 2'-O-methyl modified nucleotide with phosphorothioate linkage
  modified_base 127: mod_base = OTHER; note = Nucleotide with phosphorothioate linkage
  modified_base 128: mod_base = OTHER; note = 2'-O-methyl modified nucleotide with phosphorothioate linkage
  modified_base 129: mod_base = OTHER; note = 2'-O-methyl modified nucleotide with phosphorothioate linkage
  modified_base 130: mod_base = OTHER; note = 2'-O-methyl modified nucleotide

SEQ ID NO: 1109 - RNA, 130 nt, synthetic construct; identical to SEQ ID NO: 716
  source 1..130: mol_type = other RNA
  modified_base 1: mod_base = OTHER; note = 2'-O-methyl modified nucleotide with phosphorothioate linkage
  modified_base 2: mod_base = OTHER; note = 2'-O-methyl modified nucleotide with phosphorothioate linkage
  modified_base 3: mod_base = OTHER; note = 2'-O-methyl modified nucleotide with phosphorothioate linkage
  modified_base 127: mod_base = OTHER; note = Nucleotide with phosphorothioate linkage
  modified_base 128: mod_base = OTHER; note = 2'-O-methyl modified nucleotide with phosphorothioate linkage
  modified_base 129: mod_base = OTHER; note = 2'-O-methyl modified nucleotide with phosphorothioate linkage
  modified_base 130: mod_base = OTHER; note = 2'-O-methyl modified nucleotide

SEQ ID NO: 1110 - RNA, 130 nt, synthetic construct; identical to SEQ ID NO: 717
  source 1..130: mol_type = other RNA
  modified_base 1: mod_base = OTHER; note = 2'-O-methyl modified nucleotide with phosphorothioate linkage
  modified_base 2: mod_base = OTHER; note = 2'-O-methyl modified nucleotide with phosphorothioate linkage
  modified_base 3: mod_base = OTHER; note = 2'-O-methyl modified nucleotide with phosphorothioate linkage
  modified_base 127: mod_base = OTHER; note = Nucleotide with phosphorothioate linkage
  modified_base 128: mod_base = OTHER; note = 2'-O-methyl modified nucleotide with phosphorothioate linkage
  modified_base 129: mod_base = OTHER; note = 2'-O-methyl modified nucleotide with phosphorothioate linkage
  modified_base 130: mod_base = OTHER; note = 2'-O-methyl modified nucleotide

SEQ ID NO: 1111 - RNA, 130 nt, synthetic construct; identical to SEQ ID NO: 718
  source 1..130: mol_type = other RNA
  modified_base 1: mod_base = OTHER; note = 2'-O-methyl modified nucleotide with phosphorothioate linkage
  modified_base 2: mod_base = OTHER; note = 2'-O-methyl modified nucleotide with phosphorothioate linkage
  modified_base 3: mod_base = OTHER; note = 2'-O-methyl modified nucleotide with phosphorothioate linkage
  modified_base 127: mod_base = OTHER; note = Nucleotide with phosphorothioate linkage
  modified_base 128: mod_base = OTHER; note = 2'-O-methyl modified nucleotide with phosphorothioate linkage
  modified_base 129: mod_base = OTHER; note = 2'-O-methyl modified nucleotide with phosphorothioate linkage
  modified_base 130: mod_base = OTHER; note = 2'-O-methyl modified nucleotide

SEQ ID NO: 1112 - RNA, 130 nt, synthetic construct; identical to SEQ ID NO: 719
  source 1..130: mol_type = other RNA
  modified_base 1: mod_base = OTHER; note = 2'-O-methyl modified nucleotide with phosphorothioate linkage
  modified_base 2: mod_base = OTHER; note = 2'-O-methyl modified nucleotide with phosphorothioate linkage
  modified_base 3: mod_base = OTHER; note = 2'-O-methyl modified nucleotide with phosphorothioate linkage
  modified_base 127: mod_base = OTHER; note = Nucleotide with phosphorothioate linkage
  modified_base 128: mod_base = OTHER; note = 2'-O-methyl modified nucleotide with phosphorothioate linkage
  modified_base 129: mod_base = OTHER; note = 2'-O-methyl modified nucleotide with phosphorothioate linkage
  modified_base 130: mod_base = OTHER; note = 2'-O-methyl modified nucleotide

SEQ ID NO: 1113 - RNA, 130 nt, synthetic construct; identical to SEQ ID NO: 720
  source 1..130: mol_type = other RNA
  modified_base 1: mod_base = OTHER; note = 2'-O-methyl modified nucleotide with phosphorothioate linkage
  modified_base 2: mod_base = OTHER; note = 2'-O-methyl modified nucleotide with phosphorothioate linkage
  modified_base 3: mod_base = OTHER; note = 2'-O-methyl modified nucleotide with phosphorothioate linkage
  modified_base 127: mod_base = OTHER; note = Nucleotide with phosphorothioate linkage
  modified_base 128: mod_base = OTHER; note = 2'-O-methyl modified nucleotide with phosphorothioate linkage
  modified_base 129: mod_base = OTHER; note = 2'-O-methyl modified nucleotide with phosphorothioate linkage
  modified_base 130: mod_base = OTHER; note = 2'-O-methyl modified nucleotide

SEQ ID NO: 1114 - RNA, 130 nt, synthetic construct; identical to SEQ ID NO: 721
  source 1..130: mol_type = other RNA
  modified_base 1: mod_base = OTHER; note = 2'-O-methyl modified nucleotide with phosphorothioate linkage
  modified_base 2: mod_base = OTHER; note = 2'-O-methyl modified nucleotide with phosphorothioate linkage
  modified_base 3: mod_base = OTHER; note = 2'-O-methyl modified nucleotide with phosphorothioate linkage
  modified_base 127: mod_base = OTHER; note = Nucleotide with phosphorothioate linkage
  modified_base 128: mod_base = OTHER; note = 2'-O-methyl modified nucleotide with phosphorothioate linkage
  modified_base 129: mod_base = OTHER; note = 2'-O-methyl modified nucleotide with phosphorothioate linkage
  modified_base 130: mod_base = OTHER; note = 2'-O-methyl modified nucleotide

SEQ ID NO: 1115 - RNA, 130 nt, synthetic construct; identical to SEQ ID NO: 722
  source 1..130: mol_type = other RNA
  modified_base 1: mod_base = OTHER; note = 2'-O-methyl modified nucleotide with phosphorothioate linkage
  modified_base 2: mod_base = OTHER; note = 2'-O-methyl modified nucleotide with phosphorothioate linkage
  modified_base 3: mod_base = OTHER; note = 2'-O-methyl modified nucleotide with phosphorothioate linkage
  modified_base 127: mod_base = OTHER; note = Nucleotide with phosphorothioate linkage
  modified_base 128: mod_base = OTHER; note = 2'-O-methyl modified nucleotide with phosphorothioate linkage
  modified_base 129: mod_base = OTHER; note = 2'-O-methyl modified nucleotide with phosphorothioate linkage
  modified_base 130: mod_base = OTHER; note = 2'-O-methyl modified nucleotide

SEQ ID NO: 1116 - RNA, 130 nt, synthetic construct; identical to SEQ ID NO: 723
  source 1..130: mol_type = other RNA
  modified_base 1: mod_base = OTHER; note = 2'-O-methyl modified nucleotide with phosphorothioate linkage
  modified_base 2: mod_base = OTHER; note = 2'-O-methyl modified nucleotide with phosphorothioate linkage
  modified_base 3: mod_base = OTHER; note = 2'-O-methyl modified nucleotide with phosphorothioate linkage
  modified_base 127: mod_base = OTHER; note = Nucleotide with phosphorothioate linkage
  modified_base 128: mod_base = OTHER; note = 2'-O-methyl modified nucleotide with phosphorothioate linkage
  modified_base 129: mod_base = OTHER; note = 2'-O-methyl modified nucleotide with phosphorothioate linkage
  modified_base 130: mod_base = OTHER; note = 2'-O-methyl modified nucleotide

SEQ ID NO: 1117 - RNA, 130 nt, synthetic construct; identical to SEQ ID NO: 724
  source 1..130: mol_type = other RNA
  modified_base 1: mod_base = OTHER; note = 2'-O-methyl modified nucleotide with phosphorothioate linkage
  modified_base 2: mod_base = OTHER; note = 2'-O-methyl modified nucleotide with phosphorothioate linkage
  modified_base 3: mod_base = OTHER; note = 2'-O-methyl modified nucleotide with phosphorothioate linkage
  modified_base 127: mod_base = OTHER; note = Nucleotide with phosphorothioate linkage
  modified_base 128: mod_base = OTHER; note = 2'-O-methyl modified nucleotide with phosphorothioate linkage
  modified_base 129: mod_base = OTHER; note = 2'-O-methyl modified nucleotide with phosphorothioate linkage
  modified_base 130: mod_base = OTHER; note = 2'-O-methyl modified nucleotide

SEQ ID NO: 1118 - RNA, 130 nt, synthetic construct; identical to SEQ ID NO: 725
  source 1..130: mol_type = other RNA
  modified_base 1: mod_base = OTHER; note = 2'-O-methyl modified nucleotide with phosphorothioate linkage
  modified_base 2: mod_base = OTHER; note = 2'-O-methyl modified nucleotide with phosphorothioate linkage
  modified_base 3: mod_base = OTHER; note = 2'-O-methyl modified nucleotide with phosphorothioate linkage
  modified_base 127: mod_base = OTHER; note = Nucleotide with phosphorothioate linkage
  modified_base 128: mod_base = OTHER; note = 2'-O-methyl modified nucleotide with phosphorothioate linkage
  modified_base 129: mod_base = OTHER; note = 2'-O-methyl modified nucleotide with phosphorothioate linkage
  modified_base 130: mod_base = OTHER; note = 2'-O-methyl modified nucleotide

SEQ ID NO: 1119 - RNA, 130 nt, synthetic construct; identical to SEQ ID NO: 726
  source 1..130: mol_type = other RNA
  modified_base 1: mod_base = OTHER; note = 2'-O-methyl modified nucleotide with phosphorothioate linkage
  modified_base 2: mod_base = OTHER; note = 2'-O-methyl modified nucleotide with phosphorothioate linkage
  modified_base 3: mod_base = OTHER; note = 2'-O-methyl modified nucleotide with phosphorothioate linkage
  modified_base 127: mod_base = OTHER; note = Nucleotide with phosphorothioate linkage
  modified_base 128: mod_base = OTHER; note = 2'-O-methyl modified nucleotide with phosphorothioate linkage
  modified_base 129: mod_base = OTHER; note = 2'-O-methyl modified nucleotide with phosphorothioate linkage
  modified_base 130: mod_base = OTHER; note = 2'-O-methyl modified nucleotide

SEQ ID NO: 1120 - RNA, 130 nt, synthetic construct; identical to SEQ ID NO: 727
  source 1..130: mol_type = other RNA
  modified_base 1: mod_base = OTHER; note = 2'-O-methyl modified nucleotide with phosphorothioate linkage
  modified_base 2: mod_base = OTHER; note = 2'-O-methyl modified nucleotide with phosphorothioate linkage
  modified_base 3: mod_base = OTHER; note = 2'-O-methyl modified nucleotide with phosphorothioate linkage
  modified_base 127: mod_base = OTHER; note = Nucleotide with phosphorothioate linkage
  modified_base 128: mod_base = OTHER; note = 2'-O-methyl modified nucleotide with phosphorothioate linkage
  modified_base 129: mod_base = OTHER; note = 2'-O-methyl modified nucleotide with phosphorothioate linkage
  modified_base 130: mod_base = OTHER; note = 2'-O-methyl modified nucleotide

SEQ ID NO: 1121 - RNA, 130 nt, synthetic construct; identical to SEQ ID NO: 728
  source 1..130: mol_type = other RNA
  modified_base 1: mod_base = OTHER; note = 2'-O-methyl modified nucleotide with phosphorothioate linkage
  modified_base 2: mod_base = OTHER; note = 2'-O-methyl modified nucleotide with phosphorothioate linkage
  modified_base 3: mod_base = OTHER; note = 2'-O-methyl modified nucleotide with phosphorothioate linkage
  modified_base 127: mod_base = OTHER; note = Nucleotide with phosphorothioate linkage
  modified_base 128: mod_base = OTHER; note = 2'-O-methyl modified nucleotide with phosphorothioate linkage
  modified_base 129: mod_base = OTHER; note = 2'-O-methyl modified nucleotide with phosphorothioate linkage
  modified_base 130: mod_base = OTHER; note = 2'-O-methyl modified nucleotide

SEQ ID NO: 1122 - RNA, 130 nt, synthetic construct; identical to SEQ ID NO: 729
  source 1..130: mol_type = other RNA
  modified_base 1: mod_base = OTHER; note = 2'-O-methyl modified nucleotide with phosphorothioate linkage
  modified_base 2: mod_base = OTHER; note = 2'-O-methyl modified nucleotide with phosphorothioate linkage
  modified_base 3: mod_base = OTHER; note = 2'-O-methyl modified nucleotide with phosphorothioate linkage
  modified_base 127: mod_base = OTHER; note = Nucleotide with phosphorothioate linkage
  modified_base 128: mod_base = OTHER; note = 2'-O-methyl modified nucleotide with phosphorothioate linkage
  modified_base 129: mod_base = OTHER; note = 2'-O-methyl modified nucleotide with phosphorothioate linkage
  modified_base 130: mod_base = OTHER; note = 2'-O-methyl modified nucleotide

SEQ ID NO: 1123 - RNA, 130 nt, synthetic construct; identical to SEQ ID NO: 730
  source 1..130: mol_type = other RNA
  modified_base 1: mod_base = OTHER; note = 2'-O-methyl modified nucleotide with phosphorothioate linkage
  modified_base 2: mod_base = OTHER; note = 2'-O-methyl modified nucleotide with phosphorothioate linkage
  modified_base 3: mod_base = OTHER; note = 2'-O-methyl modified nucleotide with phosphorothioate linkage
  modified_base 127: mod_base = OTHER; note = Nucleotide with phosphorothioate linkage
  modified_base 128: mod_base = OTHER; note = 2'-O-methyl modified nucleotide with phosphorothioate linkage
  modified_base 129: mod_base = OTHER; note = 2'-O-methyl modified nucleotide with phosphorothioate linkage
  modified_base 130: mod_base = OTHER; note = 2'-O-methyl modified nucleotide

SEQ ID NO: 1124 - RNA, 130 nt, synthetic construct; identical to SEQ ID NO: 731
  source 1..130: mol_type = other RNA
  modified_base 1: mod_base = OTHER; note = 2'-O-methyl modified nucleotide with phosphorothioate linkage
  modified_base 2: mod_base = OTHER; note = 2'-O-methyl modified nucleotide with phosphorothioate linkage
  modified_base 3: mod_base = OTHER; note = 2'-O-methyl modified nucleotide with phosphorothioate linkage
  modified_base 127: mod_base = OTHER; note = Nucleotide with phosphorothioate linkage
  modified_base 128: mod_base = OTHER; note = 2'-O-methyl modified nucleotide with phosphorothioate linkage
  modified_base 129: mod_base = OTHER; note = 2'-O-methyl modified nucleotide with phosphorothioate linkage
  modified_base 130: mod_base = OTHER; note = 2'-O-methyl modified nucleotide

SEQ ID NO: 1125 - RNA, 130 nt, synthetic construct; identical to SEQ ID NO: 732
  source 1..130: mol_type = other RNA
  modified_base 1: mod_base = OTHER; note = 2'-O-methyl modified nucleotide with phosphorothioate linkage
  modified_base 2: mod_base = OTHER; note = 2'-O-methyl modified nucleotide with phosphorothioate linkage
  modified_base 3: mod_base = OTHER; note = 2'-O-methyl modified nucleotide with phosphorothioate linkage
  modified_base 127: mod_base = OTHER; note = Nucleotide with phosphorothioate linkage
  modified_base 128: mod_base = OTHER; note = 2'-O-methyl modified nucleotide with phosphorothioate linkage
  modified_base 129: mod_base = OTHER; note = 2'-O-methyl modified nucleotide with phosphorothioate linkage
  modified_base 130: mod_base = OTHER; note = 2'-O-methyl modified nucleotide

SEQ ID NO: 1126 - RNA, 135 nt, synthetic construct; identical to SEQ ID NO: 733
  source 1..135: mol_type = other RNA
  modified_base 1: mod_base = OTHER; note = 2'-O-methyl modified nucleotide with phosphorothioate linkage
  modified_base 2: mod_base = OTHER; note = 2'-O-methyl modified nucleotide with phosphorothioate linkage
  modified_base 3: mod_base = OTHER; note = 2'-O-methyl modified nucleotide with phosphorothioate linkage
  modified_base 132: mod_base = OTHER; note = Nucleotide with phosphorothioate linkage
  modified_base 133: mod_base = OTHER; note = 2'-O-methyl modified nucleotide with phosphorothioate linkage
  modified_base 134: mod_base = OTHER; note = 2'-O-methyl modified nucleotide with phosphorothioate linkage
  modified_base 135: mod_base = OTHER; note = 2'-O-methyl modified nucleotide

SEQ ID NO: 1127 - RNA, 135 nt, synthetic construct; identical to SEQ ID NO: 734
  source 1..135: mol_type = other RNA
  modified_base 1: mod_base = OTHER; note = 2'-O-methyl modified nucleotide with phosphorothioate linkage
  modified_base 2: mod_base = OTHER; note = 2'-O-methyl modified nucleotide with phosphorothioate linkage
  modified_base 3: mod_base = OTHER; note = 2'-O-methyl modified nucleotide with phosphorothioate linkage
  modified_base 132: mod_base = OTHER; note = Nucleotide with phosphorothioate linkage
  modified_base 133: mod_base = OTHER; note = 2'-O-methyl modified nucleotide with phosphorothioate linkage
  modified_base 134: mod_base = OTHER; note = 2'-O-methyl modified nucleotide with phosphorothioate linkage
  modified_base 135: mod_base = OTHER; note = 2'-O-methyl modified nucleotide

SEQ ID NO: 1128 - RNA, 135 nt, synthetic construct; identical to SEQ ID NO: 735
  source 1..135: mol_type = other RNA
  modified_base 1: mod_base = OTHER; note = 2'-O-methyl modified nucleotide with phosphorothioate linkage
  modified_base 2: mod_base = OTHER; note = 2'-O-methyl modified nucleotide with phosphorothioate linkage
  modified_base 3: mod_base = OTHER; note = 2'-O-methyl modified nucleotide with phosphorothioate linkage
  modified_base 132: mod_base = OTHER; note = Nucleotide with phosphorothioate linkage
  modified_base 133: mod_base = OTHER; note = 2'-O-methyl modified nucleotide with phosphorothioate linkage
  modified_base 134: mod_base = OTHER; note = 2'-O-methyl modified nucleotide with phosphorothioate linkage
  modified_base 135: mod_base = OTHER; note = 2'-O-methyl modified nucleotide

SEQ ID NO: 1129 - RNA, 135 nt, synthetic construct; identical to SEQ ID NO: 736
  source 1..135: mol_type = other RNA
  modified_base 1: mod_base = OTHER; note = 2'-O-methyl modified nucleotide with phosphorothioate linkage
  modified_base 2: mod_base = OTHER; note = 2'-O-methyl modified nucleotide with phosphorothioate linkage
  modified_base 3: mod_base = OTHER; note = 2'-O-methyl modified nucleotide with phosphorothioate linkage
  modified_base 132: mod_base = OTHER; note = Nucleotide with phosphorothioate linkage
  modified_base 133: mod_base = OTHER; note = 2'-O-methyl modified nucleotide with phosphorothioate linkage
  modified_base 134: mod_base = OTHER; note = 2'-O-methyl modified nucleotide with phosphorothioate linkage
  modified_base 135: mod_base = OTHER; note = 2'-O-methyl modified nucleotide

SEQ ID NO: 1130 - RNA, 135 nt, synthetic construct; identical to SEQ ID NO: 737
  source 1..135: mol_type = other RNA
  modified_base 1: mod_base = OTHER; note = 2'-O-methyl modified nucleotide with phosphorothioate linkage
  modified_base 2: mod_base = OTHER; note = 2'-O-methyl modified nucleotide with phosphorothioate linkage
  modified_base 3: mod_base = OTHER; note = 2'-O-methyl modified nucleotide with phosphorothioate linkage
  modified_base 132: mod_base = OTHER; note = Nucleotide with phosphorothioate linkage
  modified_base 133: mod_base = OTHER; note = 2'-O-methyl modified nucleotide with phosphorothioate linkage
  modified_base 134: mod_base = OTHER; note = 2'-O-methyl modified nucleotide with phosphorothioate linkage
  modified_base 135: mod_base = OTHER; note = 2'-O-methyl modified nucleotide

SEQ ID NO: 1131 - RNA, 135 nt, synthetic construct; identical to SEQ ID NO: 738
  source 1..135: mol_type = other RNA
  modified_base 1: mod_base = OTHER; note = 2'-O-methyl modified nucleotide with phosphorothioate linkage
  modified_base 2: mod_base = OTHER; note = 2'-O-methyl modified nucleotide with phosphorothioate linkage
  modified_base 3: mod_base = OTHER; note = 2'-O-methyl modified nucleotide with phosphorothioate linkage
  modified_base 132: mod_base = OTHER; note = Nucleotide with phosphorothioate linkage
  modified_base 133: mod_base = OTHER; note = 2'-O-methyl modified nucleotide with phosphorothioate linkage
  modified_base 134: mod_base = OTHER; note = 2'-O-methyl modified nucleotide with phosphorothioate linkage
  modified_base 135: mod_base = OTHER; note = 2'-O-methyl modified nucleotide

SEQ ID NO: 1132 - RNA, 135 nt, synthetic construct; identical to SEQ ID NO: 739
  source 1..135: mol_type = other RNA
  modified_base 1: mod_base = OTHER; note = 2'-O-methyl modified nucleotide with phosphorothioate linkage
  modified_base 2: mod_base = OTHER; note = 2'-O-methyl modified nucleotide with phosphorothioate linkage
  modified_base 3: mod_base = OTHER; note = 2'-O-methyl modified nucleotide with phosphorothioate linkage
  modified_base 132: mod_base = OTHER; note = Nucleotide with phosphorothioate linkage
  modified_base 133: mod_base = OTHER; note = 2'-O-methyl modified nucleotide with phosphorothioate linkage
  modified_base 134: mod_base = OTHER; note = 2'-O-methyl modified nucleotide with phosphorothioate linkage
  modified_base 135: mod_base = OTHER; note = 2'-O-methyl modified nucleotide

SEQ ID NO: 1133 - RNA, 110 nt, synthetic construct; identical to SEQ ID NO: 740
  source 1..110: mol_type = other RNA
  modified_base 1: mod_base = OTHER; note = 2'-O-methyl modified nucleotide with phosphorothioate linkage
  modified_base 2: mod_base = OTHER; note = 2'-O-methyl modified nucleotide with phosphorothioate linkage
  modified_base 3: mod_base = OTHER; note = 2'-O-methyl modified nucleotide with phosphorothioate linkage
  modified_base 107: mod_base = OTHER; note = Nucleotide with phosphorothioate linkage
  modified_base 108: mod_base = OTHER; note = 2'-O-methyl modified nucleotide with phosphorothioate linkage
  modified_base 109: mod_base = OTHER; note = 2'-O-methyl modified nucleotide with phosphorothioate linkage
  modified_base 110: mod_base = OTHER; note = 2'-O-methyl modified nucleotide

SEQ ID NO: 1134 - RNA, 110 nt, synthetic construct; identical to SEQ ID NO: 741
  source 1..110: mol_type = other RNA
  modified_base 1: mod_base = OTHER; note = 2'-O-methyl modified nucleotide with phosphorothioate linkage
  modified_base 2: mod_base = OTHER; note = 2'-O-methyl modified nucleotide with phosphorothioate linkage
  modified_base 3: mod_base = OTHER; note = 2'-O-methyl modified nucleotide with phosphorothioate linkage
  modified_base 107: mod_base = OTHER; note = Nucleotide with phosphorothioate linkage
  modified_base 108: mod_base = OTHER; note = 2'-O-methyl modified nucleotide with phosphorothioate linkage
  modified_base 109: mod_base = OTHER; note = 2'-O-methyl modified nucleotide with phosphorothioate linkage
  modified_base 110: mod_base = OTHER; note = 2'-O-methyl modified nucleotide

SEQ ID NO: 1135 - RNA, 110 nt, synthetic construct; identical to SEQ ID NO: 742
  source 1..110: mol_type = other RNA
  modified_base 1: mod_base = OTHER; note = 2'-O-methyl modified nucleotide with phosphorothioate linkage
  modified_base 2: mod_base = OTHER; note = 2'-O-methyl modified nucleotide with phosphorothioate linkage
  modified_base 3: mod_base = OTHER; note = 2'-O-methyl modified nucleotide with phosphorothioate linkage
  modified_base 107: mod_base = OTHER; note = Nucleotide with phosphorothioate linkage
  modified_base 108: mod_base = OTHER; note = 2'-O-methyl modified nucleotide with phosphorothioate linkage
  modified_base 109: mod_base = OTHER; note = 2'-O-methyl modified nucleotide with phosphorothioate linkage
  modified_base 110: mod_base = OTHER; note = 2'-O-methyl modified nucleotide

SEQ ID NO: 1136 - RNA, 135 nt, synthetic construct; identical to SEQ ID NO: 743
  source 1..135: mol_type = other RNA
  modified_base 1: mod_base = OTHER; note = 2'-O-methyl modified nucleotide with phosphorothioate linkage
  modified_base 2: mod_base = OTHER; note = 2'-O-methyl modified nucleotide with phosphorothioate linkage
  modified_base 3: mod_base = OTHER; note = 2'-O-methyl modified nucleotide with phosphorothioate linkage
  modified_base 132: mod_base = OTHER; note = Nucleotide with phosphorothioate linkage
  modified_base 133: mod_base = OTHER; note = 2'-O-methyl modified nucleotide with phosphorothioate linkage
  modified_base 134: mod_base = OTHER; note = 2'-O-methyl modified nucleotide with phosphorothioate linkage
  modified_base 135: mod_base = OTHER; note = 2'-O-methyl modified nucleotide

SEQ ID NO: 1137 - RNA, 135 nt, synthetic construct; identical to SEQ ID NO: 744
  source 1..135: mol_type = other RNA
  modified_base 1: mod_base = OTHER; note = 2'-O-methyl modified nucleotide with phosphorothioate linkage
  modified_base 2: mod_base = OTHER; note = 2'-O-methyl modified nucleotide with phosphorothioate linkage
  modified_base 3: mod_base = OTHER; note = 2'-O-methyl modified nucleotide with phosphorothioate linkage
  modified_base 132: mod_base = OTHER; note = Nucleotide with phosphorothioate linkage
  modified_base 133: mod_base = OTHER; note = 2'-O-methyl modified nucleotide with phosphorothioate linkage
  modified_base 134: mod_base = OTHER; note = 2'-O-methyl modified nucleotide with phosphorothioate linkage
  modified_base 135: mod_base = OTHER; note = 2'-O-methyl modified nucleotide

SEQ ID NO: 1138 - RNA, 135 nt, synthetic construct; identical to SEQ ID NO: 745
  source 1..135: mol_type = other RNA
  modified_base 1: mod_base = OTHER; note = 2'-O-methyl modified nucleotide with phosphorothioate linkage
  modified_base 2: mod_base = OTHER; note = 2'-O-methyl modified nucleotide with phosphorothioate linkage
  modified_base 3: mod_base = OTHER; note = 2'-O-methyl modified nucleotide with phosphorothioate linkage
  modified_base 132: mod_base = OTHER; note = Nucleotide with phosphorothioate linkage
  modified_base 133: mod_base = OTHER; note = 2'-O-methyl modified nucleotide with phosphorothioate linkage
  modified_base 134: mod_base = OTHER; note = 2'-O-methyl modified nucleotide with phosphorothioate linkage
  modified_base 135: mod_base = OTHER; note = 2'-O-methyl modified nucleotide

SEQ ID NO: 1139 - RNA, 135 nt, synthetic construct; identical to SEQ ID NO: 746
  source 1..135: mol_type = other RNA
  modified_base 1: mod_base = OTHER; note = 2'-O-methyl modified nucleotide with phosphorothioate linkage
  modified_base 2: mod_base = OTHER; note = 2'-O-methyl modified nucleotide with phosphorothioate linkage
  modified_base 3: mod_base = OTHER; note = 2'-O-methyl modified nucleotide with phosphorothioate linkage
  modified_base 132: mod_base = OTHER; note = Nucleotide with phosphorothioate linkage
  modified_base 133: mod_base = OTHER; note = 2'-O-methyl modified nucleotide with phosphorothioate linkage
  modified_base 134: mod_base = OTHER; note = 2'-O-methyl modified nucleotide with phosphorothioate linkage
  modified_base 135: mod_base = OTHER; note = 2'-O-methyl modified nucleotide

SEQ ID NO: 1140 - RNA, 135 nt, synthetic construct; identical to SEQ ID NO: 747
  source 1..135: mol_type = other RNA
  modified_base 1: mod_base = OTHER; note = 2'-O-methyl modified nucleotide with phosphorothioate linkage
  modified_base 2: mod_base = OTHER; note = 2'-O-methyl modified nucleotide with phosphorothioate linkage
  modified_base 3: mod_base = OTHER; note = 2'-O-methyl modified nucleotide with phosphorothioate linkage
  modified_base 132: mod_base = OTHER; note = Nucleotide with phosphorothioate linkage
  modified_base 133: mod_base = OTHER; note = 2'-O-methyl modified nucleotide with phosphorothioate linkage
  modified_base 134: mod_base = OTHER; note = 2'-O-methyl modified nucleotide with phosphorothioate linkage
  modified_base 135: mod_base = OTHER; note = 2'-O-methyl modified nucleotide

SEQ ID NO: 1141 - RNA, 135 nt, synthetic construct; identical to SEQ ID NO: 748
  source 1..135: mol_type = other RNA
  modified_base 1: mod_base = OTHER; note = 2'-O-methyl modified nucleotide with phosphorothioate linkage
  modified_base 2: mod_base = OTHER; note = 2'-O-methyl modified nucleotide with phosphorothioate linkage
  modified_base 3: mod_base = OTHER; note = 2'-O-methyl modified nucleotide with phosphorothioate linkage
  modified_base 132: mod_base = OTHER; note = Nucleotide with phosphorothioate linkage
  modified_base 133: mod_base = OTHER; note = 2'-O-methyl modified nucleotide with phosphorothioate linkage
  modified_base 134: mod_base = OTHER; note = 2'-O-methyl modified nucleotide with phosphorothioate linkage
  modified_base 135: mod_base = OTHER; note = 2'-O-methyl modified nucleotide

SEQ ID NO: 1142 - RNA, 135 nt, synthetic construct; identical to SEQ ID NO: 749
  source 1..135: mol_type = other RNA
  modified_base 1: mod_base = OTHER; note = 2'-O-methyl modified nucleotide with phosphorothioate linkage
  modified_base 2: mod_base = OTHER; note = 2'-O-methyl modified nucleotide with phosphorothioate linkage
  modified_base 3: mod_base = OTHER; note = 2'-O-methyl modified nucleotide with phosphorothioate linkage
  modified_base 132: mod_base = OTHER; note = Nucleotide with phosphorothioate linkage
  modified_base 133: mod_base = OTHER; note = 2'-O-methyl modified nucleotide with phosphorothioate linkage
  modified_base 134: mod_base = OTHER; note = 2'-O-methyl modified nucleotide with phosphorothioate linkage
  modified_base 135: mod_base = OTHER; note = 2'-O-methyl modified nucleotide

SEQ ID NO: 1143 - RNA, 135 nt, synthetic construct; identical to SEQ ID NO: 750
  source 1..135: mol_type = other RNA
  modified_base 1: mod_base = OTHER; note = 2'-O-methyl modified nucleotide with phosphorothioate linkage
  modified_base 2: mod_base = OTHER; note = 2'-O-methyl modified nucleotide with phosphorothioate linkage
  modified_base 3: mod_base = OTHER; note = 2'-O-methyl modified nucleotide with phosphorothioate linkage
  modified_base 132: mod_base = OTHER; note = Nucleotide with phosphorothioate linkage
  modified_base 133: mod_base = OTHER; note = 2'-O-methyl modified nucleotide with phosphorothioate linkage
  modified_base 134: mod_base = OTHER; note = 2'-O-methyl modified nucleotide with phosphorothioate linkage
  modified_base 135: mod_base = OTHER; note = 2'-O-methyl modified nucleotide

SEQ ID NO: 1144 - RNA, 135 nt, synthetic construct; identical to SEQ ID NO: 751
  source 1..135: mol_type = other RNA
  modified_base 1: mod_base = OTHER; note = 2'-O-methyl modified nucleotide with phosphorothioate linkage
  modified_base 2: mod_base = OTHER; note = 2'-O-methyl modified nucleotide with phosphorothioate linkage
  modified_base 3: mod_base = OTHER; note = 2'-O-methyl modified nucleotide with phosphorothioate linkage
  modified_base 132: mod_base = OTHER; note = Nucleotide with phosphorothioate linkage
  modified_base 133: mod_base = OTHER; note = 2'-O-methyl modified nucleotide with phosphorothioate linkage
  modified_base 134: mod_base = OTHER; note = 2'-O-methyl modified nucleotide with phosphorothioate linkage
  modified_base 135: mod_base = OTHER; note = 2'-O-methyl modified nucleotide

SEQ ID NO: 1145 - RNA, 135 nt, synthetic construct; identical to SEQ ID NO: 752
  source 1..135: mol_type = other RNA
  modified_base 1: mod_base = OTHER; note = 2'-O-methyl modified nucleotide with phosphorothioate linkage
  modified_base 2: mod_base = OTHER; note = 2'-O-methyl modified nucleotide with phosphorothioate linkage
  modified_base 3: mod_base = OTHER; note = 2'-O-methyl modified nucleotide with phosphorothioate linkage
  modified_base 132: mod_base = OTHER; note = Nucleotide with phosphorothioate linkage
  modified_base 133: mod_base = OTHER; note = 2'-O-methyl modified nucleotide with phosphorothioate linkage
  modified_base 134: mod_base = OTHER; note = 2'-O-methyl modified nucleotide with phosphorothioate linkage
  modified_base 135: mod_base = OTHER; note = 2'-O-methyl modified nucleotide

SEQ ID NO: 1146 - RNA, 135 nt, synthetic construct; identical to SEQ ID NO: 753
  source 1..135: mol_type = other RNA
  modified_base 1: mod_base = OTHER; note = 2'-O-methyl modified nucleotide with phosphorothioate linkage
  modified_base 2: mod_base = OTHER; note = 2'-O-methyl modified nucleotide with phosphorothioate linkage
  modified_base 3: mod_base = OTHER; note = 2'-O-methyl modified nucleotide with phosphorothioate linkage
  modified_base 132: mod_base = OTHER; note = Nucleotide with phosphorothioate linkage
  modified_base 133: mod_base = OTHER; note = 2'-O-methyl modified nucleotide with phosphorothioate linkage
  modified_base 134: mod_base = OTHER; note = 2'-O-methyl modified nucleotide with phosphorothioate linkage
  modified_base 135: mod_base = OTHER; note = 2'-O-methyl modified nucleotide

SEQ ID NO: 1147 - RNA, 135 nt, synthetic construct; identical to SEQ ID NO: 754
  source 1..135: mol_type = other RNA
  modified_base 1: mod_base = OTHER; note = 2'-O-methyl modified nucleotide with phosphorothioate linkage
  modified_base 2: mod_base = OTHER; note = 2'-O-methyl modified nucleotide with phosphorothioate linkage
  modified_base 3: mod_base = OTHER; note = 2'-O-methyl modified nucleotide with phosphorothioate linkage
  modified_base 132: mod_base = OTHER; note = Nucleotide with phosphorothioate linkage
  modified_base 133: mod_base = OTHER; note = 2'-O-methyl modified nucleotide with phosphorothioate linkage
  modified_base 134: mod_base = OTHER; note = 2'-O-methyl modified nucleotide with phosphorothioate linkage
  modified_base 135: mod_base = OTHER; note = 2'-O-methyl modified nucleotide

SEQ ID NO: 1148 - RNA, 135 nt, synthetic construct; identical to SEQ ID NO: 755
  source 1..135: mol_type = other RNA
  modified_base 1: mod_base = OTHER; note = 2'-O-methyl modified nucleotide with phosphorothioate linkage
  modified_base 2: mod_base = OTHER; note = 2'-O-methyl modified nucleotide with phosphorothioate linkage
  modified_base 3: mod_base = OTHER; note = 2'-O-methyl modified nucleotide with phosphorothioate linkage
  modified_base 132: mod_base = OTHER; note = Nucleotide with phosphorothioate linkage
  modified_base 133: mod_base = OTHER; note = 2'-O-methyl modified nucleotide with phosphorothioate linkage
  modified_base 134: mod_base = OTHER; note = 2'-O-methyl modified nucleotide with phosphorothioate linkage
  modified_base 135: mod_base = OTHER; note = 2'-O-methyl modified nucleotide

SEQ ID NO: 1149 - RNA, 135 nt, synthetic construct; identical to SEQ ID NO: 756
  source 1..135: mol_type = other RNA
  modified_base 1: mod_base = OTHER; note = 2'-O-methyl modified nucleotide with phosphorothioate linkage
  modified_base 2: mod_base = OTHER; note = 2'-O-methyl modified nucleotide with phosphorothioate linkage
  modified_base 3: mod_base = OTHER; note = 2'-O-methyl modified nucleotide with phosphorothioate linkage
  modified_base 132: mod_base = OTHER; note = Nucleotide with phosphorothioate linkage
  modified_base 133: mod_base = OTHER; note = 2'-O-methyl modified nucleotide with phosphorothioate linkage
  modified_base 134: mod_base = OTHER; note = 2'-O-methyl modified nucleotide with phosphorothioate linkage
  modified_base 135: mod_base = OTHER; note = 2'-O-methyl modified nucleotide

SEQ ID NO: 1150 - RNA, 135 nt, synthetic construct; identical to SEQ ID NO: 757
  source 1..135: mol_type = other RNA
  modified_base 1: mod_base = OTHER; note = 2'-O-methyl modified nucleotide with phosphorothioate linkage
  modified_base 2: mod_base = OTHER; note = 2'-O-methyl modified nucleotide with phosphorothioate linkage
  modified_base 3: mod_base = OTHER; note = 2'-O-methyl modified nucleotide with phosphorothioate linkage
  modified_base 132: mod_base = OTHER; note = Nucleotide with phosphorothioate linkage
  modified_base 133: mod_base = OTHER; note = 2'-O-methyl modified nucleotide with phosphorothioate linkage
  modified_base 134: mod_base = OTHER; note = 2'-O-methyl modified nucleotide with phosphorothioate linkage
  modified_base 135: mod_base = OTHER; note = 2'-O-methyl modified nucleotide

SEQ ID NO: 1151 - RNA, 135 nt, synthetic construct; identical to SEQ ID NO: 758
  source 1..135: mol_type = other RNA
  modified_base 1: mod_base = OTHER; note = 2'-O-methyl modified nucleotide with phosphorothioate linkage
  modified_base 2: mod_base = OTHER; note = 2'-O-methyl modified nucleotide with phosphorothioate linkage
  modified_base 3: mod_base = OTHER; note = 2'-O-methyl modified nucleotide with phosphorothioate linkage
  modified_base 132: mod_base = OTHER; note = Nucleotide with phosphorothioate linkage
  modified_base 133: mod_base = OTHER; note = 2'-O-methyl modified nucleotide with phosphorothioate linkage
  modified_base 134: mod_base = OTHER; note = 2'-O-methyl modified nucleotide with phosphorothioate linkage
  modified_base 135: mod_base = OTHER; note = 2'-O-methyl modified nucleotide

SEQ ID NO: 1152 - RNA, 135 nt, synthetic construct; identical to SEQ ID NO: 759
  source 1..135: mol_type = other RNA
  modified_base 1: mod_base = OTHER; note = 2'-O-methyl modified nucleotide with phosphorothioate linkage
  modified_base 2: mod_base = OTHER; note = 2'-O-methyl modified nucleotide with phosphorothioate linkage
  modified_base 3: mod_base = OTHER; note = 2'-O-methyl modified nucleotide with phosphorothioate linkage
  modified_base 132: mod_base = OTHER; note = Nucleotide with phosphorothioate linkage
  modified_base 133: mod_base = OTHER; note = 2'-O-methyl modified nucleotide with phosphorothioate linkage
  modified_base 134: mod_base = OTHER; note = 2'-O-methyl modified nucleotide with phosphorothioate linkage
  modified_base 135: mod_base = OTHER; note = 2'-O-methyl modified nucleotide

SEQ ID NO: 1153 - RNA, 135 nt, synthetic construct; identical to SEQ ID NO: 760
  source 1..135: mol_type = other RNA
  modified_base 1: mod_base = OTHER; note = 2'-O-methyl modified nucleotide with phosphorothioate linkage
  modified_base 2: mod_base = OTHER; note = 2'-O-methyl modified nucleotide with phosphorothioate linkage
  modified_base 3: mod_base = OTHER; note = 2'-O-methyl modified nucleotide with phosphorothioate linkage
  modified_base 132: mod_base = OTHER; note = Nucleotide with phosphorothioate linkage
  modified_base 133: mod_base = OTHER; note = 2'-O-methyl modified nucleotide with phosphorothioate linkage
  modified_base 134: mod_base = OTHER; note = 2'-O-methyl modified nucleotide with phosphorothioate linkage
  modified_base 135: mod_base = OTHER; note = 2'-O-methyl modified nucleotide

SEQ ID NO: 1154 - RNA, 135 nt, synthetic construct; identical to SEQ ID NO: 761
  source 1..135: mol_type = other RNA
  modified_base 1: mod_base = OTHER; note = 2'-O-methyl modified nucleotide with phosphorothioate linkage
  modified_base 2: mod_base = OTHER; note = 2'-O-methyl modified nucleotide with phosphorothioate linkage
  modified_base 3: mod_base = OTHER; note = 2'-O-methyl modified nucleotide with phosphorothioate linkage
  modified_base 132: mod_base = OTHER; note = Nucleotide with phosphorothioate linkage
  modified_base 133: mod_base = OTHER; note = 2'-O-methyl modified nucleotide with phosphorothioate linkage
  modified_base 134: mod_base = OTHER; note = 2'-O-methyl modified nucleotide with phosphorothioate linkage
  modified_base 135: mod_base = OTHER; note = 2'-O-methyl modified nucleotide

SEQ ID NO: 1155 - RNA, 135 nt, synthetic construct; identical to SEQ ID NO: 762
  source 1..135: mol_type = other RNA
  modified_base 1: mod_base = OTHER; note = 2'-O-methyl modified nucleotide with phosphorothioate linkage
  modified_base 2: mod_base = OTHER; note = 2'-O-methyl modified nucleotide with phosphorothioate linkage
  modified_base 3: mod_base = OTHER; note = 2'-O-methyl modified nucleotide with phosphorothioate linkage
  modified_base 132: mod_base = OTHER; note = Nucleotide with phosphorothioate linkage
  modified_base 133: mod_base = OTHER; note = 2'-O-methyl modified nucleotide with phosphorothioate linkage
  modified_base 134: mod_base = OTHER; note = 2'-O-methyl modified nucleotide with phosphorothioate linkage
  modified_base 135: mod_base = OTHER; note = 2'-O-methyl modified nucleotide

SEQ ID NO: 1156 - RNA, 135 nt, synthetic construct; identical to SEQ ID NO: 763
  source 1..135: mol_type = other RNA
  modified_base 1: mod_base = OTHER; note = 2'-O-methyl modified nucleotide with phosphorothioate linkage
  modified_base 2: mod_base = OTHER; note = 2'-O-methyl modified nucleotide with phosphorothioate linkage
  modified_base 3: mod_base = OTHER; note = 2'-O-methyl modified nucleotide with phosphorothioate linkage
  modified_base 132: mod_base = OTHER; note = Nucleotide with phosphorothioate linkage
  modified_base 133: mod_base = OTHER; note = 2'-O-methyl modified nucleotide with phosphorothioate linkage
  modified_base 134: mod_base = OTHER; note = 2'-O-methyl modified nucleotide with phosphorothioate linkage
  modified_base 135: mod_base = OTHER; note = 2'-O-methyl modified nucleotide

SEQ ID NO: 1157 - RNA, 135 nt, synthetic construct; identical to SEQ ID NO: 764
  source 1..135: mol_type = other RNA
  modified_base 1: mod_base = OTHER; note = 2'-O-methyl modified nucleotide with phosphorothioate linkage
  modified_base 2: mod_base = OTHER; note = 2'-O-methyl modified nucleotide with phosphorothioate linkage
  modified_base 3: mod_base = OTHER; note = 2'-O-methyl modified nucleotide with phosphorothioate linkage
  modified_base 132: mod_base = OTHER; note = Nucleotide with phosphorothioate linkage
  modified_base 133: mod_base = OTHER; note = 2'-O-methyl modified nucleotide with phosphorothioate linkage
  modified_base 134: mod_base = OTHER; note = 2'-O-methyl modified nucleotide with phosphorothioate linkage
  modified_base 135: mod_base = OTHER; note = 2'-O-methyl modified nucleotide

SEQ ID NO: 1158 - RNA, 135 nt, synthetic construct; identical to SEQ ID NO: 765
  source 1..135: mol_type = other RNA
  modified_base 1: mod_base = OTHER; note = 2'-O-methyl modified nucleotide with phosphorothioate linkage
  modified_base 2: mod_base = OTHER; note = 2'-O-methyl modified nucleotide with phosphorothioate linkage
  modified_base 3: mod_base = OTHER; note = 2'-O-methyl modified nucleotide with phosphorothioate linkage
  modified_base 132: mod_base = OTHER; note = Nucleotide with phosphorothioate linkage
  modified_base 133: mod_base = OTHER; note = 2'-O-methyl modified nucleotide with phosphorothioate linkage
  modified_base 134: mod_base = OTHER; note = 2'-O-methyl modified nucleotide with phosphorothioate linkage
  modified_base 135: mod_base = OTHER; note = 2'-O-methyl modified nucleotide

SEQ ID NO: 1159 - RNA, 135 nt, synthetic construct; identical to SEQ ID NO: 766
  source 1..135: mol_type = other RNA
  modified_base 1: mod_base = OTHER; note = 2'-O-methyl modified nucleotide with phosphorothioate linkage
  modified_base 2: mod_base = OTHER; note = 2'-O-methyl modified nucleotide with phosphorothioate linkage
  modified_base 3: mod_base = OTHER; note = 2'-O-methyl modified nucleotide with phosphorothioate linkage
  modified_base 132: mod_base = OTHER; note = Nucleotide with phosphorothioate linkage
  modified_base 133: mod_base = OTHER; note = 2'-O-methyl modified nucleotide with phosphorothioate linkage
  modified_base 134: mod_base = OTHER; note = 2'-O-methyl modified nucleotide with phosphorothioate linkage
  modified_base 135: mod_base = OTHER; note = 2'-O-methyl modified nucleotide

SEQ ID NO: 1160 - RNA, 135 nt, synthetic construct; identical to SEQ ID NO: 767
  source 1..135: mol_type = other RNA
  modified_base 1: mod_base = OTHER; note = 2'-O-methyl modified nucleotide with phosphorothioate linkage
  modified_base 2: mod_base = OTHER; note = 2'-O-methyl modified nucleotide with phosphorothioate linkage
  modified_base 3: mod_base = OTHER; note = 2'-O-methyl modified nucleotide with phosphorothioate linkage
  modified_base 132: mod_base = OTHER; note = Nucleotide with phosphorothioate linkage
  modified_base 133: mod_base = OTHER; note = 2'-O-methyl modified nucleotide with phosphorothioate linkage
  modified_base 134: mod_base = OTHER; note = 2'-O-methyl modified nucleotide with phosphorothioate linkage
  modified_base 135: mod_base = OTHER; note = 2'-O-methyl modified nucleotide

SEQ ID NO: 1161 - RNA, 135 nt, synthetic construct; identical to SEQ ID NO: 768
  source 1..135: mol_type = other RNA
  modified_base 1: mod_base = OTHER; note = 2'-O-methyl modified nucleotide with phosphorothioate linkage
  modified_base 2: mod_base = OTHER; note = 2'-O-methyl modified nucleotide with phosphorothioate linkage
  modified_base 3: mod_base = OTHER; note = 2'-O-methyl modified nucleotide with phosphorothioate linkage
  modified_base 132: mod_base = OTHER; note = Nucleotide with phosphorothioate linkage
  modified_base 133: mod_base = OTHER; note = 2'-O-methyl modified nucleotide with phosphorothioate linkage
  modified_base 134: mod_base = OTHER; note = 2'-O-methyl modified nucleotide with phosphorothioate linkage
  modified_base 135: mod_base = OTHER; note = 2'-O-methyl modified nucleotide

SEQ ID NO: 1162 - RNA, 135 nt, synthetic construct; identical to SEQ ID NO: 769
  source 1..135: mol_type = other RNA
  modified_base 1: mod_base = OTHER; note = 2'-O-methyl modified nucleotide with phosphorothioate linkage
  modified_base 2: mod_base = OTHER; note = 2'-O-methyl modified nucleotide with phosphorothioate linkage
  modified_base 3: mod_base = OTHER; note = 2'-O-methyl modified nucleotide with phosphorothioate linkage
  modified_base 132: mod_base = OTHER; note = Nucleotide with phosphorothioate linkage
  modified_base 133: mod_base = OTHER; note = 2'-O-methyl modified nucleotide with phosphorothioate linkage
  modified_base 134: mod_base = OTHER; note = 2'-O-methyl modified nucleotide with phosphorothioate linkage
  modified_base 135: mod_base = OTHER; note = 2'-O-methyl modified nucleotide

SEQ ID NO: 1163 - RNA, 135 nt, synthetic construct; identical to SEQ ID NO: 770
  source 1..135: mol_type = other RNA
  modified_base 1: mod_base = OTHER; note = 2'-O-methyl modified nucleotide with phosphorothioate linkage
  modified_base 2: mod_base = OTHER; note = 2'-O-methyl modified nucleotide with phosphorothioate linkage
  modified_base 3: mod_base = OTHER; note = 2'-O-methyl modified nucleotide with phosphorothioate linkage
  modified_base 132: mod_base = OTHER; note = Nucleotide with phosphorothioate linkage
  modified_base 133: mod_base = OTHER; note = 2'-O-methyl modified nucleotide with phosphorothioate linkage
  modified_base 134: mod_base = OTHER; note = 2'-O-methyl modified nucleotide with phosphorothioate linkage
  modified_base 135: mod_base = OTHER; note = 2'-O-methyl modified nucleotide

SEQ ID NO: 1164 - RNA, 135 nt, synthetic construct; identical to SEQ ID NO: 771
  source 1..135: mol_type = other RNA
  modified_base 1: mod_base = OTHER; note = 2'-O-methyl modified nucleotide with phosphorothioate linkage
  modified_base 2: mod_base = OTHER; note = 2'-O-methyl modified nucleotide with phosphorothioate linkage
  modified_base 3: mod_base = OTHER; note = 2'-O-methyl modified nucleotide with phosphorothioate linkage
  modified_base 132: mod_base = OTHER; note = Nucleotide with phosphorothioate linkage
  modified_base 133: mod_base = OTHER; note = 2'-O-methyl modified nucleotide with phosphorothioate linkage
  modified_base 134: mod_base = OTHER; note = 2'-O-methyl modified nucleotide with phosphorothioate linkage
  modified_base 135: mod_base = OTHER; note = 2'-O-methyl modified nucleotide

SEQ ID NO: 1165 - RNA, 135 nt, synthetic construct; identical to SEQ ID NO: 772
  source 1..135: mol_type = other RNA
  modified_base 1: mod_base = OTHER; note = 2'-O-methyl modified nucleotide with phosphorothioate linkage
  modified_base 2: mod_base = OTHER; note = 2'-O-methyl modified nucleotide with phosphorothioate linkage
  modified_base 3: mod_base = OTHER; note = 2'-O-methyl modified nucleotide with phosphorothioate linkage
  modified_base 132: mod_base = OTHER; note = Nucleotide with phosphorothioate linkage
  modified_base 133: mod_base = OTHER; note = 2'-O-methyl modified nucleotide with phosphorothioate linkage
  modified_base 134: mod_base = OTHER; note = 2'-O-methyl modified nucleotide with phosphorothioate linkage
  modified_base 135: mod_base = OTHER; note = 2'-O-methyl modified nucleotide

SEQ ID NO: 1166 - RNA, 135 nt, synthetic construct; identical to SEQ ID NO: 773
  source 1..135: mol_type = other RNA
  modified_base 1: mod_base = OTHER; note = 2'-O-methyl modified nucleotide with phosphorothioate linkage
  modified_base 2: mod_base = OTHER; note = 2'-O-methyl modified nucleotide with phosphorothioate linkage
  modified_base 3: mod_base = OTHER; note = 2'-O-methyl modified nucleotide with phosphorothioate linkage
  modified_base 132: mod_base = OTHER; note = Nucleotide with phosphorothioate linkage
  modified_base 133: mod_base = OTHER; note = 2'-O-methyl modified nucleotide with phosphorothioate linkage
  modified_base 134: mod_base = OTHER; note = 2'-O-methyl modified nucleotide with phosphorothioate linkage
  modified_base 135: mod_base = OTHER; note = 2'-O-methyl modified nucleotide

SEQ ID NO: 1167 - RNA, 119 nt, synthetic construct; identical to SEQ ID NO: 774
  source 1..119: mol_type = other RNA
  modified_base 1: mod_base = OTHER; note = 2'-O-methyl modified nucleotide with phosphorothioate linkage
  modified_base 2: mod_base = OTHER; note = 2'-O-methyl modified nucleotide with phosphorothioate linkage
  modified_base 3: mod_base = OTHER; note = 2'-O-methyl modified nucleotide with phosphorothioate linkage
  modified_base 116: mod_base = OTHER; note = Nucleotide with phosphorothioate linkage
  modified_base 117: mod_base = OTHER; note = 2'-O-methyl modified nucleotide with phosphorothioate linkage
  modified_base 118: mod_base = OTHER; note = 2'-O-methyl modified nucleotide with phosphorothioate linkage
  modified_base 119: mod_base = OTHER; note = 2'-O-methyl modified nucleotide

SEQ ID NO: 1168 - RNA, 118 nt, synthetic construct; identical to SEQ ID NO: 775
  source 1..118: mol_type = other RNA
  modified_base 1: mod_base = OTHER; note = 2'-O-methyl modified nucleotide with phosphorothioate linkage
  modified_base 2: mod_base = OTHER; note = 2'-O-methyl modified nucleotide with phosphorothioate linkage
  modified_base 3: mod_base = OTHER; note = 2'-O-methyl modified nucleotide with phosphorothioate linkage
  modified_base 115: mod_base = OTHER; note = Nucleotide with phosphorothioate linkage
  modified_base 116: mod_base = OTHER; note = 2'-O-methyl modified nucleotide with phosphorothioate linkage
  modified_base 117: mod_base = OTHER; note = 2'-O-methyl modified nucleotide with phosphorothioate linkage
  modified_base 118: mod_base = OTHER; note = 2'-O-methyl modified nucleotide

SEQ ID NO: 1169 - RNA, 116 nt, synthetic construct; identical to SEQ ID NO: 776
  source 1..116: mol_type = other RNA
  modified_base 1: mod_base = OTHER; note = 2'-O-methyl modified nucleotide with phosphorothioate linkage
  modified_base 2: mod_base = OTHER; note = 2'-O-methyl modified nucleotide with phosphorothioate linkage
  modified_base 3: mod_base = OTHER; note = 2'-O-methyl modified nucleotide with phosphorothioate linkage
  modified_base 113: mod_base = OTHER; note = Nucleotide with phosphorothioate linkage
  modified_base 114: mod_base = OTHER; note = 2'-O-methyl modified nucleotide with phosphorothioate linkage
  modified_base 115: mod_base = OTHER; note = 2'-O-methyl modified nucleotide with phosphorothioate linkage
  modified_base 116: mod_base = OTHER; note = 2'-O-methyl modified nucleotide

SEQ ID NO: 1170 - RNA, 119 nt, synthetic construct; identical to SEQ ID NO: 777
  source 1..119: mol_type = other RNA
  modified_base 1: mod_base = OTHER; note = 2'-O-methyl modified nucleotide with phosphorothioate linkage
  modified_base 2: mod_base = OTHER; note = 2'-O-methyl modified nucleotide with phosphorothioate linkage
  modified_base 3: mod_base = OTHER; note = 2'-O-methyl modified nucleotide with phosphorothioate linkage
  modified_base 116: mod_base = OTHER; note = Nucleotide with phosphorothioate linkage
  modified_base 117: mod_base = OTHER; note = 2'-O-methyl modified nucleotide with phosphorothioate linkage
  modified_base 118: mod_base = OTHER; note = 2'-O-methyl modified nucleotide with phosphorothioate linkage
  modified_base 119: mod_base = OTHER; note = 2'-O-methyl modified nucleotide

SEQ ID NO: 1171 - RNA, 118 nt, synthetic construct; identical to SEQ ID NO: 778
  source 1..118: mol_type = other RNA
  modified_base 1: mod_base = OTHER; note = 2'-O-methyl modified nucleotide with phosphorothioate linkage
  modified_base 2: mod_base = OTHER; note = 2'-O-methyl modified nucleotide with phosphorothioate linkage
  modified_base 3: mod_base = OTHER; note = 2'-O-methyl modified nucleotide with phosphorothioate linkage
  modified_base 115: mod_base = OTHER; note = Nucleotide with phosphorothioate linkage
  modified_base 116: mod_base = OTHER; note = 2'-O-methyl modified nucleotide with phosphorothioate linkage
  modified_base 117: mod_base = OTHER; note = 2'-O-methyl modified nucleotide with phosphorothioate linkage
  modified_base 118: mod_base = OTHER; note = 2'-O-methyl modified nucleotide

SEQ ID NO: 1172 - RNA, 116 nt, synthetic construct; identical to SEQ ID NO: 779
  source 1..116: mol_type = other RNA
  modified_base 1: mod_base = OTHER; note = 2'-O-methyl modified nucleotide with phosphorothioate linkage
  modified_base 2: mod_base = OTHER; note = 2'-O-methyl modified nucleotide with phosphorothioate linkage
  modified_base 3: mod_base = OTHER; note = 2'-O-methyl modified nucleotide with phosphorothioate linkage
  modified_base 113: mod_base = OTHER; note = Nucleotide with phosphorothioate linkage
  modified_base 114: mod_base = OTHER; note = 2'-O-methyl modified nucleotide with phosphorothioate linkage
  modified_base 115: mod_base = OTHER; note = 2'-O-methyl modified nucleotide with phosphorothioate linkage
  modified_base 116: mod_base = OTHER; note = 2'-O-methyl modified nucleotide

SEQ ID NO: 1173 - RNA, 119 nt, synthetic construct; identical to SEQ ID NO: 780
  source 1..119: mol_type = other RNA
  modified_base 1: mod_base = OTHER; note = 2'-O-methyl modified nucleotide with phosphorothioate linkage
  modified_base 2: mod_base = OTHER; note = 2'-O-methyl modified nucleotide with phosphorothioate linkage
  modified_base 3: mod_base = OTHER; note = 2'-O-methyl modified nucleotide with phosphorothioate linkage
  modified_base 116: mod_base = OTHER; note = Nucleotide with phosphorothioate linkage
  modified_base 117: mod_base = OTHER; note = 2'-O-methyl modified nucleotide with phosphorothioate linkage
  modified_base 118: mod_base = OTHER; note = 2'-O-methyl modified nucleotide with phosphorothioate linkage
  modified_base 119: mod_base = OTHER; note = 2'-O-methyl modified nucleotide

SEQ ID NO: 1174 - RNA, 118 nt, synthetic construct; identical to SEQ ID NO: 781
  source 1..118: mol_type = other RNA
  modified_base 1: mod_base = OTHER; note = 2'-O-methyl modified nucleotide with phosphorothioate linkage
  modified_base 2: mod_base = OTHER; note = 2'-O-methyl modified nucleotide with phosphorothioate linkage
  modified_base 3: mod_base = OTHER; note = 2'-O-methyl modified nucleotide with phosphorothioate linkage
  modified_base 115: mod_base = OTHER; note = Nucleotide with phosphorothioate linkage
  modified_base 116: mod_base = OTHER; note = 2'-O-methyl modified nucleotide with phosphorothioate linkage
  modified_base 117: mod_base = OTHER; note = 2'-O-methyl modified nucleotide with phosphorothioate linkage
  modified_base 118: mod_base = OTHER; note = 2'-O-methyl modified nucleotide

SEQ ID NO: 1175 - RNA, 117 nt, synthetic construct; identical to SEQ ID NO: 782
  source 1..117: mol_type = other RNA
  modified_base 1: mod_base = OTHER; note = 2'-O-methyl modified nucleotide with phosphorothioate linkage
  modified_base 2: mod_base = OTHER; note = 2'-O-methyl modified nucleotide with phosphorothioate linkage
  modified_base 3: mod_base = OTHER; note = 2'-O-methyl modified nucleotide with phosphorothioate linkage
  modified_base 114: mod_base = OTHER; note = Nucleotide with phosphorothioate linkage
  modified_base 115: mod_base = OTHER; note = 2'-O-methyl modified nucleotide with phosphorothioate linkage
  modified_base 116: mod_base = OTHER; note = 2'-O-methyl modified nucleotide with phosphorothioate linkage
  modified_base 117: mod_base = OTHER; note = 2'-O-methyl modified nucleotide

SEQ ID NO: 1176 - RNA, 116 nt, synthetic construct; identical to SEQ ID NO: 783
  source 1..116: mol_type = other RNA
  modified_base 1: mod_base = OTHER; note = 2'-O-methyl modified nucleotide with phosphorothioate linkage
  modified_base 2: mod_base = OTHER; note = 2'-O-methyl modified nucleotide with phosphorothioate linkage
  modified_base 3: mod_base = OTHER; note = 2'-O-methyl modified nucleotide with phosphorothioate linkage
  modified_base 113: mod_base = OTHER; note = Nucleotide with phosphorothioate linkage
  modified_base 114: mod_base = OTHER; note = 2'-O-methyl modified nucleotide with phosphorothioate linkage
  modified_base 115: mod_base = OTHER; note = 2'-O-methyl modified nucleotide with phosphorothioate linkage
  modified_base 116: mod_base = OTHER; note = 2'-O-methyl modified nucleotide

SEQ ID NO: 1177 - RNA, 119 nt, synthetic construct; identical to SEQ ID NO: 784
  source 1..119: mol_type = other RNA
  modified_base 1: mod_base = OTHER; note = 2'-O-methyl modified nucleotide with phosphorothioate linkage
  modified_base 2: mod_base = OTHER; note = 2'-O-methyl modified nucleotide with phosphorothioate linkage
  modified_base 3: mod_base = OTHER; note = 2'-O-methyl modified nucleotide with phosphorothioate linkage
  modified_base 116: mod_base = OTHER; note = Nucleotide with phosphorothioate linkage
  modified_base 117: mod_base = OTHER; note = 2'-O-methyl modified nucleotide with phosphorothioate linkage
  modified_base 118: mod_base = OTHER; note = 2'-O-methyl modified nucleotide with phosphorothioate linkage
  modified_base 119: mod_base = OTHER; note = 2'-O-methyl modified nucleotide

SEQ ID NO: 1178 - RNA, 118 nt, synthetic construct; identical to SEQ ID NO: 785
  source 1..118: mol_type = other RNA
  modified_base 1: mod_base = OTHER; note = 2'-O-methyl modified nucleotide with phosphorothioate linkage
  modified_base 2: mod_base = OTHER; note = 2'-O-methyl modified nucleotide with phosphorothioate linkage
  modified_base 3: mod_base = OTHER; note = 2'-O-methyl modified nucleotide with phosphorothioate linkage
  modified_base 115: mod_base = OTHER; note = Nucleotide with phosphorothioate linkage
  modified_base 116: mod_base = OTHER; note = 2'-O-methyl modified nucleotide with phosphorothioate linkage
  modified_base 117: mod_base = OTHER; note = 2'-O-methyl modified nucleotide with phosphorothioate linkage
  modified_base 118: mod_base = OTHER; note = 2'-O-methyl modified nucleotide

SEQ ID NO: 1179 - RNA, 116 nt, synthetic construct; identical to SEQ ID NO: 786
  source 1..116: mol_type = other RNA
  modified_base 1: mod_base = OTHER; note = 2'-O-methyl modified nucleotide with phosphorothioate linkage
  modified_base 2: mod_base = OTHER; note = 2'-O-methyl modified nucleotide with phosphorothioate linkage
  modified_base 3: mod_base = OTHER; note = 2'-O-methyl modified nucleotide with phosphorothioate linkage
  modified_base 113: mod_base = OTHER; note = Nucleotide with phosphorothioate linkage
  modified_base 114: mod_base = OTHER; note = 2'-O-methyl modified nucleotide with phosphorothioate linkage
  modified_base 115: mod_base = OTHER; note = 2'-O-methyl modified nucleotide with phosphorothioate linkage
  modified_base 116: mod_base = OTHER; note = 2'-O-methyl modified nucleotide

SEQ ID NO: 1180 - RNA, 110 nt, synthetic construct; identical to SEQ ID NO: 787
  source 1..110: mol_type = other RNA
  modified_base 1: mod_base = OTHER; note = 2'-O-methyl modified nucleotide with phosphorothioate linkage
  modified_base 2: mod_base = OTHER; note = 2'-O-methyl modified nucleotide with phosphorothioate linkage
  modified_base 3: mod_base = OTHER; note = 2'-O-methyl modified nucleotide with phosphorothioate linkage
  modified_base 107: mod_base = OTHER; note = Nucleotide with phosphorothioate linkage
  modified_base 108: mod_base = OTHER; note = 2'-O-methyl modified nucleotide with phosphorothioate linkage
  modified_base 109: mod_base = OTHER; note = 2'-O-methyl modified nucleotide with phosphorothioate linkage
  modified_base 110: mod_base = OTHER; note = 2'-O-methyl modified nucleotide

SEQ ID NO: 1181 - RNA, 123 nt, synthetic construct; identical to SEQ ID NO: 788
  source 1..123: mol_type = other RNA
  modified_base 1: mod_base = OTHER; note = 2'-O-methyl modified nucleotide with phosphorothioate linkage
  modified_base 2: mod_base = OTHER; note = 2'-O-methyl modified nucleotide with phosphorothioate linkage
  modified_base 3: mod_base = OTHER; note = 2'-O-methyl modified nucleotide with phosphorothioate linkage
  modified_base 120: mod_base = OTHER; note = Nucleotide with phosphorothioate linkage
  modified_base 121: mod_base = OTHER; note = 2'-O-methyl modified nucleotide with phosphorothioate linkage
  modified_base 122: mod_base = OTHER; note = 2'-O-methyl modified nucleotide with phosphorothioate linkage
  modified_base 123: mod_base = OTHER; note = 2'-O-methyl modified nucleotide

SEQ ID NO: 1182 - RNA, 117 nt, synthetic construct; identical to SEQ ID NO: 789
  source 1..117: mol_type = other RNA
  modified_base 1: mod_base = OTHER; note = 2'-O-methyl modified nucleotide with phosphorothioate linkage
  modified_base 2: mod_base = OTHER; note = 2'-O-methyl modified nucleotide with phosphorothioate linkage
  modified_base 3: mod_base = OTHER; note = 2'-O-methyl modified nucleotide with phosphorothioate linkage
  modified_base 114: mod_base = OTHER; note = Nucleotide with phosphorothioate linkage
  modified_base 115: mod_base = OTHER; note = 2'-O-methyl modified nucleotide with phosphorothioate linkage
  modified_base 116: mod_base = OTHER; note = 2'-O-methyl modified nucleotide with phosphorothioate linkage
  modified_base 117: mod_base = OTHER; note = 2'-O-methyl modified nucleotide

SEQ ID NO: 1183 - RNA, 115 nt, synthetic construct; identical to SEQ ID NO: 790
  source 1..115: mol_type = other RNA
  modified_base 1: mod_base = OTHER; note = 2'-O-methyl modified nucleotide with phosphorothioate linkage
  modified_base 2: mod_base = OTHER; note = 2'-O-methyl modified nucleotide with phosphorothioate linkage
  modified_base 3: mod_base = OTHER; note = 2'-O-methyl modified nucleotide with phosphorothioate linkage
  modified_base 112: mod_base = OTHER; note = Nucleotide with phosphorothioate linkage
  modified_base 113: mod_base = OTHER; note = 2'-O-methyl modified nucleotide with phosphorothioate linkage
  modified_base 114: mod_base = OTHER; note = 2'-O-methyl modified nucleotide with phosphorothioate linkage
  modified_base 115: mod_base = OTHER; note = 2'-O-methyl modified nucleotide

SEQ ID NO: 1184 - RNA, 121 nt, synthetic construct; identical to SEQ ID NO: 791
  source 1..121: mol_type = other RNA
  modified_base 1: mod_base = OTHER; note = 2'-O-methyl modified nucleotide with phosphorothioate linkage
  modified_base 2: mod_base = OTHER; note = 2'-O-methyl modified nucleotide with phosphorothioate linkage
  modified_base 3: mod_base = OTHER; note = 2'-O-methyl modified nucleotide with phosphorothioate linkage
  modified_base 118: mod_base = OTHER; note = Nucleotide with phosphorothioate linkage
  modified_base 119: mod_base = OTHER; note = 2'-O-methyl modified nucleotide with phosphorothioate linkage
  modified_base 120: mod_base = OTHER; note = 2'-O-methyl modified nucleotide with phosphorothioate linkage
  modified_base 121: mod_base = OTHER; note = 2'-O-methyl modified nucleotide

SEQ ID NO: 1185 - RNA, 115 nt, synthetic construct; identical to SEQ ID NO: 792
  source 1..115: mol_type = other RNA
  modified_base 1: mod_base = OTHER; note = 2'-O-methyl modified nucleotide with phosphorothioate linkage
  modified_base 2: mod_base = OTHER; note = 2'-O-methyl modified nucleotide with phosphorothioate linkage
  modified_base 3: mod_base = OTHER; note = 2'-O-methyl modified nucleotide with phosphorothioate linkage
  modified_base 112: mod_base = OTHER; note = Nucleotide with phosphorothioate linkage
  modified_base 113: mod_base = OTHER; note = 2'-O-methyl modified nucleotide with phosphorothioate linkage
  modified_base 114: mod_base = OTHER; note = 2'-O-methyl modified nucleotide with phosphorothioate linkage
  modified_base 115: mod_base = OTHER; note = 2'-O-methyl modified nucleotide

SEQ ID NO: 1186 - RNA, 113 nt, synthetic construct; identical to SEQ ID NO: 793
  source 1..113: mol_type = other RNA
  modified_base 1: mod_base = OTHER; note = 2'-O-methyl modified nucleotide with phosphorothioate linkage
  modified_base 2: mod_base = OTHER; note = 2'-O-methyl modified nucleotide with phosphorothioate linkage
  modified_base 3: mod_base = OTHER; note = 2'-O-methyl modified nucleotide with phosphorothioate linkage
  modified_base 110: mod_base = OTHER; note = Nucleotide with phosphorothioate linkage
  modified_base 111: mod_base = OTHER; note = 2'-O-methyl modified nucleotide with phosphorothioate linkage
  modified_base 112: mod_base = OTHER; note = 2'-O-methyl modified nucleotide with phosphorothioate linkage
  modified_base 113: mod_base = OTHER; note = 2'-O-methyl modified nucleotide

SEQ ID NO: 1187 - RNA, 119 nt, synthetic construct; identical to SEQ ID NO: 794
  source 1..119: mol_type = other RNA
  modified_base 1: mod_base = OTHER; note = 2'-O-methyl modified nucleotide with phosphorothioate linkage
  modified_base 2: mod_base = OTHER; note = 2'-O-methyl modified nucleotide with phosphorothioate linkage
  modified_base 3: mod_base = OTHER; note = 2'-O-methyl modified nucleotide with phosphorothioate linkage
  modified_base 116: mod_base = OTHER; note = Nucleotide with phosphorothioate linkage
  modified_base 117: mod_base = OTHER; note = 2'-O-methyl modified nucleotide with phosphorothioate linkage
  modified_base 118: mod_base = OTHER; note = 2'-O-methyl modified nucleotide with phosphorothioate linkage
  modified_base 119: mod_base = OTHER; note = 2'-O-methyl modified nucleotide

SEQ ID NO: 1188 - RNA, 113 nt, synthetic construct; identical to SEQ ID NO: 795
  source 1..113: mol_type = other RNA
  modified_base 1: mod_base = OTHER; note = 2'-O-methyl modified nucleotide with phosphorothioate linkage
  modified_base 2: mod_base = OTHER; note = 2'-O-methyl modified nucleotide with phosphorothioate linkage
  modified_base 3: mod_base = OTHER; note = 2'-O-methyl modified nucleotide with phosphorothioate linkage
  modified_base 110: mod_base = OTHER; note = Nucleotide with phosphorothioate linkage
  modified_base 111: mod_base = OTHER; note = 2'-O-methyl modified nucleotide with phosphorothioate linkage
  modified_base 112: mod_base = OTHER; note = 2'-O-methyl modified nucleotide with phosphorothioate linkage
  modified_base 113: mod_base = OTHER; note = 2'-O-methyl modified nucleotide

SEQ ID NO: 1189 - RNA, 111 nt, synthetic construct; identical to SEQ ID NO: 796
  source 1..111: mol_type = other RNA
  modified_base 1: mod_base = OTHER; note = 2'-O-methyl modified nucleotide with phosphorothioate linkage
  modified_base 2: mod_base = OTHER; note = 2'-O-methyl modified nucleotide with phosphorothioate linkage
  modified_base 3: mod_base = OTHER; note = 2'-O-methyl modified nucleotide with phosphorothioate linkage
  modified_base 108: mod_base = OTHER; note = Nucleotide with phosphorothioate linkage
  modified_base 109: mod_base = OTHER; note = 2'-O-methyl modified nucleotide with phosphorothioate linkage
  modified_base 110: mod_base = OTHER; note = 2'-O-methyl modified nucleotide with phosphorothioate linkage
  modified_base 111: mod_base = OTHER; note = 2'-O-methyl modified nucleotide

SEQ ID NO: 1190 - RNA, 123 nt, synthetic construct; identical to SEQ ID NO: 797
  source 1..123: mol_type = other RNA
  modified_base 1: mod_base = OTHER; note = 2'-O-methyl modified nucleotide with phosphorothioate linkage
  modified_base 2: mod_base = OTHER; note = 2'-O-methyl modified nucleotide with phosphorothioate linkage
  modified_base 3: mod_base = OTHER; note = 2'-O-methyl modified nucleotide with phosphorothioate linkage
  modified_base 120: mod_base = OTHER; note = Nucleotide with phosphorothioate linkage
  modified_base 121: mod_base = OTHER; note = 2'-O-methyl modified nucleotide with phosphorothioate linkage
  modified_base 122: mod_base = OTHER; note = 2'-O-methyl modified nucleotide with phosphorothioate linkage
  modified_base 123: mod_base = OTHER; note = 2'-O-methyl modified nucleotide

SEQ ID NO: 1191 - RNA, 117 nt, synthetic construct; identical to SEQ ID NO: 798
  source 1..117: mol_type = other RNA
  modified_base 1: mod_base = OTHER; note = 2'-O-methyl modified nucleotide with phosphorothioate linkage
  modified_base 2: mod_base = OTHER; note = 2'-O-methyl modified nucleotide with phosphorothioate linkage
  modified_base 3: mod_base = OTHER; note = 2'-O-methyl modified nucleotide with phosphorothioate linkage
  modified_base 114: mod_base = OTHER; note = Nucleotide with phosphorothioate linkage
  modified_base 115: mod_base = OTHER; note = 2'-O-methyl modified nucleotide with phosphorothioate linkage
  modified_base 116: mod_base = OTHER; note = 2'-O-methyl modified nucleotide with phosphorothioate linkage
  modified_base 117: mod_base = OTHER; note = 2'-O-methyl modified nucleotide

SEQ ID NO: 1192 - RNA, 115 nt, synthetic construct; identical to SEQ ID NO: 799
  source 1..115: mol_type = other RNA
  modified_base 1: mod_base = OTHER; note = 2'-O-methyl modified nucleotide with phosphorothioate linkage
  modified_base 2: mod_base = OTHER; note = 2'-O-methyl modified nucleotide with phosphorothioate linkage
  modified_base 3: mod_base = OTHER; note = 2'-O-methyl modified nucleotide with phosphorothioate linkage
  modified_base 112: mod_base = OTHER; note = Nucleotide with phosphorothioate linkage
  modified_base 113: mod_base = OTHER; note = 2'-O-methyl modified nucleotide with phosphorothioate linkage
  modified_base 114: mod_base = OTHER; note = 2'-O-methyl modified nucleotide with phosphorothioate linkage
  modified_base 115: mod_base = OTHER; note = 2'-O-methyl modified nucleotide

SEQ ID NO: 1193 - RNA, 121 nt, synthetic construct; identical to SEQ ID NO: 800
  source 1..121: mol_type = other RNA
  modified_base 1: mod_base = OTHER; note = 2'-O-methyl modified nucleotide with phosphorothioate linkage
  modified_base 2: mod_base = OTHER; note = 2'-O-methyl modified nucleotide with phosphorothioate linkage
  modified_base 3: mod_base = OTHER; note = 2'-O-methyl modified nucleotide with phosphorothioate linkage
  modified_base 118: mod_base = OTHER; note = Nucleotide with phosphorothioate linkage
  modified_base 119: mod_base = OTHER; note = 2'-O-methyl modified nucleotide with phosphorothioate linkage
  modified_base 120: mod_base = OTHER; note = 2'-O-methyl modified nucleotide with phosphorothioate linkage
  modified_base 121: mod_base = OTHER; note = 2'-O-methyl modified nucleotide

SEQ ID NO: 1194 - RNA, 115 nt, synthetic construct; identical to SEQ ID NO: 801
  source 1..115: mol_type = other RNA
  modified_base 1: mod_base = OTHER; note = 2'-O-methyl modified nucleotide with phosphorothioate linkage
  modified_base 2: mod_base = OTHER; note = 2'-O-methyl modified nucleotide with phosphorothioate linkage
  modified_base 3: mod_base = OTHER; note = 2'-O-methyl modified nucleotide with phosphorothioate linkage
  modified_base 112: mod_base = OTHER; note = Nucleotide with phosphorothioate linkage
  modified_base 113: mod_base = OTHER; note = 2'-O-methyl modified nucleotide with phosphorothioate linkage
  modified_base 114: mod_base = OTHER; note = 2'-O-methyl modified nucleotide with phosphorothioate linkage
  modified_base 115: mod_base = OTHER; note = 2'-O-methyl modified nucleotide

SEQ ID NO: 1195 - RNA, 113 nt, synthetic construct; identical to SEQ ID NO: 802
  source 1..113: mol_type = other RNA
  modified_base 1: mod_base = OTHER; note = 2'-O-methyl modified nucleotide with phosphorothioate linkage
  modified_base 2: mod_base = OTHER; note = 2'-O-methyl modified nucleotide with phosphorothioate linkage
  modified_base 3: mod_base = OTHER; note = 2'-O-methyl modified nucleotide with phosphorothioate linkage
  modified_base 110: mod_base = OTHER; note = Nucleotide with phosphorothioate linkage
  modified_base 111: mod_base = OTHER; note = 2'-O-methyl modified nucleotide with phosphorothioate linkage
  modified_base 112: mod_base = OTHER; note = 2'-O-methyl modified nucleotide with phosphorothioate linkage
  modified_base 113: mod_base = OTHER; note = 2'-O-methyl modified nucleotide

SEQ ID NO: 1196 - RNA, 119 nt, synthetic construct; identical to SEQ ID NO: 803
  source 1..119: mol_type = other RNA
  modified_base 1: mod_base = OTHER; note = 2'-O-methyl modified nucleotide with phosphorothioate linkage
  modified_base 2: mod_base = OTHER; note = 2'-O-methyl modified nucleotide with phosphorothioate linkage
  modified_base 3: mod_base = OTHER; note = 2'-O-methyl modified nucleotide with phosphorothioate linkage
  modified_base 116: mod_base = OTHER; note = Nucleotide with phosphorothioate linkage
  modified_base 117: mod_base = OTHER; note = 2'-O-methyl modified nucleotide with phosphorothioate linkage
  modified_base 118: mod_base = OTHER; note = 2'-O-methyl modified nucleotide with phosphorothioate linkage
  modified_base 119: mod_base = OTHER; note = 2'-O-methyl modified nucleotide

SEQ ID NO: 1197 - RNA, 113 nt, synthetic construct; identical to SEQ ID NO: 804
  source 1..113: mol_type = other RNA
  modified_base 1: mod_base = OTHER; note = 2'-O-methyl modified nucleotide with phosphorothioate linkage
  modified_base 2: mod_base = OTHER; note = 2'-O-methyl modified nucleotide with phosphorothioate linkage
  modified_base 3: mod_base = OTHER; note = 2'-O-methyl modified nucleotide with phosphorothioate linkage
  modified_base 110: mod_base = OTHER; note = Nucleotide with phosphorothioate linkage
  modified_base 111: mod_base = OTHER; note = 2'-O-methyl modified nucleotide with phosphorothioate linkage
  modified_base 112: mod_base = OTHER; note = 2'-O-methyl modified nucleotide with phosphorothioate linkage
  modified_base 113: mod_base = OTHER; note = 2'-O-methyl modified nucleotide

SEQ ID NO: 1198 - RNA, 111 nt, synthetic construct; identical to SEQ ID NO: 805
  source 1..111: mol_type = other RNA
  modified_base 1: mod_base = OTHER; note = 2'-O-methyl modified nucleotide with phosphorothioate linkage
  modified_base 2: mod_base = OTHER; note = 2'-O-methyl modified nucleotide with phosphorothioate linkage
  modified_base 3: mod_base = OTHER; note = 2'-O-methyl modified nucleotide with phosphorothioate linkage
  modified_base 108: mod_base = OTHER; note = Nucleotide with phosphorothioate linkage
  modified_base 109: mod_base = OTHER; note = 2'-O-methyl modified nucleotide with phosphorothioate linkage
  modified_base 110: mod_base = OTHER; note = 2'-O-methyl modified nucleotide with phosphorothioate linkage
  modified_base 111: mod_base = OTHER; note = 2'-O-methyl modified nucleotide

SEQ ID NO: 1199 - RNA, 123 nt, synthetic construct; identical to SEQ ID NO: 806
  source 1..123: mol_type = other RNA
  modified_base 1: mod_base = OTHER; note = 2'-O-methyl modified nucleotide with phosphorothioate linkage
  modified_base 2: mod_base = OTHER; note = 2'-O-methyl modified nucleotide with phosphorothioate linkage
  modified_base 3: mod_base = OTHER; note = 2'-O-methyl modified nucleotide with phosphorothioate linkage
  modified_base 120: mod_base = OTHER; note = Nucleotide with phosphorothioate linkage
  modified_base 121: mod_base = OTHER; note = 2'-O-methyl modified nucleotide with phosphorothioate linkage
  modified_base 122: mod_base = OTHER; note = 2'-O-methyl modified nucleotide with phosphorothioate linkage
  modified_base 123: mod_base = OTHER; note = 2'-O-methyl modified nucleotide

SEQ ID NO: 1200 - RNA, 117 nt, synthetic construct; identical to SEQ ID NO: 807
  source 1..117: mol_type = other RNA
  modified_base 1: mod_base = OTHER; note = 2'-O-methyl modified nucleotide with phosphorothioate linkage
  modified_base 2: mod_base = OTHER; note = 2'-O-methyl modified nucleotide with phosphorothioate linkage
  modified_base 3: mod_base = OTHER; note = 2'-O-methyl modified nucleotide with phosphorothioate linkage
  modified_base 114: mod_base = OTHER; note = Nucleotide with phosphorothioate linkage
  modified_base 115: mod_base = OTHER; note = 2'-O-methyl modified nucleotide with phosphorothioate linkage
  modified_base 116: mod_base = OTHER; note = 2'-O-methyl modified nucleotide with phosphorothioate linkage
  modified_base 117: mod_base = OTHER; note = 2'-O-methyl modified nucleotide

SEQ ID NO: 1201 - RNA, 115 nt, synthetic construct; identical to SEQ ID NO: 808
  source 1..115: mol_type = other RNA
  modified_base 1: mod_base = OTHER; note = 2'-O-methyl modified nucleotide with phosphorothioate linkage
  modified_base 2: mod_base = OTHER; note = 2'-O-methyl modified nucleotide with phosphorothioate linkage
  modified_base 3: mod_base = OTHER; note = 2'-O-methyl modified nucleotide with phosphorothioate linkage
  modified_base 112: mod_base = OTHER; note = Nucleotide with phosphorothioate linkage
  modified_base 113: mod_base = OTHER; note = 2'-O-methyl modified nucleotide with phosphorothioate linkage
  modified_base 114: mod_base = OTHER; note = 2'-O-methyl modified nucleotide with phosphorothioate linkage
  modified_base 115: mod_base = OTHER; note = 2'-O-methyl modified nucleotide

SEQ ID NO: 1202 - RNA, 121 nt, synthetic construct; identical to SEQ ID NO: 809
  source 1..121: mol_type = other RNA
  modified_base 1: mod_base = OTHER; note = 2'-O-methyl modified nucleotide with phosphorothioate linkage
  modified_base 2: mod_base = OTHER; note = 2'-O-methyl modified nucleotide with phosphorothioate linkage
  modified_base 3: mod_base = OTHER; note = 2'-O-methyl modified nucleotide with phosphorothioate linkage
  modified_base 118: mod_base = OTHER; note = Nucleotide with phosphorothioate linkage
  modified_base 119: mod_base = OTHER; note = 2'-O-methyl modified nucleotide with phosphorothioate linkage
  modified_base 120: mod_base = OTHER; note = 2'-O-methyl modified nucleotide with phosphorothioate linkage
  modified_base 121: mod_base = OTHER; note = 2'-O-methyl modified nucleotide

SEQ ID NO: 1203 - RNA, 115 nt, synthetic construct; identical to SEQ ID NO: 810
  source 1..115: mol_type = other RNA
  modified_base 1: mod_base = OTHER; note = 2'-O-methyl modified nucleotide with phosphorothioate linkage
  modified_base 2: mod_base = OTHER; note = 2'-O-methyl modified nucleotide with phosphorothioate linkage
  modified_base 3: mod_base = OTHER; note = 2'-O-methyl modified nucleotide with phosphorothioate linkage
  modified_base 112: mod_base = OTHER; note = Nucleotide with phosphorothioate linkage
  modified_base 113: mod_base = OTHER; note = 2'-O-methyl modified nucleotide with phosphorothioate linkage
  modified_base 114: mod_base = OTHER; note = 2'-O-methyl modified nucleotide with phosphorothioate linkage
  modified_base 115: mod_base = OTHER; note = 2'-O-methyl modified nucleotide

SEQ ID NO: 1204 - RNA, 113 nt, synthetic construct; identical to SEQ ID NO: 811
  source 1..113: mol_type = other RNA
  modified_base 1: mod_base = OTHER; note = 2'-O-methyl modified nucleotide with phosphorothioate linkage
  modified_base 2: mod_base = OTHER; note = 2'-O-methyl modified nucleotide with phosphorothioate linkage
  modified_base 3: mod_base = OTHER; note = 2'-O-methyl modified nucleotide with phosphorothioate linkage
  modified_base 110: mod_base = OTHER; note = Nucleotide with phosphorothioate linkage
  modified_base 111: mod_base = OTHER; note = 2'-O-methyl modified nucleotide with phosphorothioate linkage
  modified_base 112: mod_base = OTHER; note = 2'-O-methyl modified nucleotide with phosphorothioate linkage
  modified_base 113: mod_base = OTHER; note = 2'-O-methyl modified nucleotide

SEQ ID NO: 1205 - RNA, 113 nt, synthetic construct; identical to SEQ ID NO: 812
  source 1..113: mol_type = other RNA
  modified_base 1: mod_base = OTHER; note = 2'-O-methyl modified nucleotide with phosphorothioate linkage
  modified_base 2: mod_base = OTHER; note = 2'-O-methyl modified nucleotide with phosphorothioate linkage
  modified_base 3: mod_base = OTHER; note = 2'-O-methyl modified nucleotide with phosphorothioate linkage
  modified_base 110: mod_base = OTHER; note = Nucleotide with phosphorothioate linkage
  modified_base 111: mod_base = OTHER; note = 2'-O-methyl modified nucleotide with phosphorothioate linkage
  modified_base 112: mod_base = OTHER; note = 2'-O-methyl modified nucleotide with phosphorothioate linkage
  modified_base 113: mod_base = OTHER; note = 2'-O-methyl modified nucleotide

SEQ ID NO: 1206 - RNA, 111 nt, synthetic construct; identical to SEQ ID NO: 813
  source 1..111: mol_type = other RNA
  modified_base 1: mod_base = OTHER; note = 2'-O-methyl modified nucleotide with phosphorothioate linkage
  modified_base 2: mod_base = OTHER; note = 2'-O-methyl modified nucleotide with phosphorothioate linkage
  modified_base 3: mod_base = OTHER; note = 2'-O-methyl modified nucleotide with phosphorothioate linkage
  modified_base 108: mod_base = OTHER; note = Nucleotide with phosphorothioate linkage
  modified_base 109: mod_base = OTHER; note = 2'-O-methyl modified nucleotide with phosphorothioate linkage
  modified_base 110: mod_base = OTHER; note = 2'-O-methyl modified nucleotide with phosphorothioate linkage
  modified_base 111: mod_base = OTHER; note = 2'-O-methyl modified nucleotide

SEQ ID NO: 1207 - RNA, 123 nt, synthetic construct; identical to SEQ ID NO: 814
  source 1..123: mol_type = other RNA
  modified_base 1: mod_base = OTHER; note = 2'-O-methyl modified nucleotide with phosphorothioate linkage
  modified_base 2: mod_base = OTHER; note = 2'-O-methyl modified nucleotide with phosphorothioate linkage
  modified_base 3: mod_base = OTHER; note = 2'-O-methyl modified nucleotide with phosphorothioate linkage
  modified_base 120: mod_base = OTHER; note = Nucleotide with phosphorothioate linkage
  modified_base 121: mod_base = OTHER; note = 2'-O-methyl modified nucleotide with phosphorothioate linkage
  modified_base 122: mod_base = OTHER; note = 2'-O-methyl modified nucleotide with phosphorothioate linkage
  modified_base 123: mod_base = OTHER; note = 2'-O-methyl modified nucleotide

SEQ ID NO: 1208 - RNA, 117 nt, synthetic construct; identical to SEQ ID NO: 815
  source 1..117: mol_type = other RNA
  modified_base 1: mod_base = OTHER; note = 2'-O-methyl modified nucleotide with phosphorothioate linkage
  modified_base 2: mod_base = OTHER; note = 2'-O-methyl modified nucleotide with phosphorothioate linkage
  modified_base 3: mod_base = OTHER; note = 2'-O-methyl modified nucleotide with phosphorothioate linkage
  modified_base 114: mod_base = OTHER; note = Nucleotide with phosphorothioate linkage
  modified_base 115: mod_base = OTHER; note = 2'-O-methyl modified nucleotide with phosphorothioate linkage
  modified_base 116: mod_base = OTHER; note = 2'-O-methyl modified nucleotide with phosphorothioate linkage
  modified_base 117: mod_base = OTHER; note = 2'-O-methyl modified nucleotide

SEQ ID NO: 1209 - RNA, 115 nt, synthetic construct; identical to SEQ ID NO: 816
  source 1..115: mol_type = other RNA
  modified_base 1: mod_base = OTHER; note = 2'-O-methyl modified nucleotide with phosphorothioate linkage
  modified_base 2: mod_base = OTHER; note = 2'-O-methyl modified nucleotide with phosphorothioate linkage
  modified_base 3: mod_base = OTHER; note = 2'-O-methyl modified nucleotide with phosphorothioate linkage
  modified_base 112: mod_base = OTHER; note = Nucleotide with phosphorothioate linkage
  modified_base 113: mod_base = OTHER; note = 2'-O-methyl modified nucleotide with phosphorothioate linkage
  modified_base 114: mod_base = OTHER; note = 2'-O-methyl modified nucleotide with phosphorothioate linkage
  modified_base 115: mod_base = OTHER; note = 2'-O-methyl modified nucleotide

SEQ ID NO: 1210 - RNA, 121 nt, synthetic construct; identical to SEQ ID NO: 817
  source 1..121: mol_type = other RNA
  modified_base 1: mod_base = OTHER; note = 2'-O-methyl modified nucleotide with phosphorothioate linkage
  modified_base 2: mod_base = OTHER; note = 2'-O-methyl modified nucleotide with phosphorothioate linkage
  modified_base 3: mod_base = OTHER; note = 2'-O-methyl modified nucleotide with phosphorothioate linkage
  modified_base 118: mod_base = OTHER; note = Nucleotide with phosphorothioate linkage
  modified_base 119: mod_base = OTHER; note = 2'-O-methyl modified nucleotide with phosphorothioate linkage
  modified_base 120: mod_base = OTHER; note = 2'-O-methyl modified nucleotide with phosphorothioate linkage
  modified_base 121: mod_base = OTHER; note = 2'-O-methyl modified nucleotide

SEQ ID NO: 1211 - RNA, 115 nt, synthetic construct; identical to SEQ ID NO: 818
  source 1..115: mol_type = other RNA
  modified_base 1: mod_base = OTHER; note = 2'-O-methyl modified nucleotide with phosphorothioate linkage
  modified_base 2: mod_base = OTHER; note = 2'-O-methyl modified nucleotide with phosphorothioate linkage
  modified_base 3: mod_base = OTHER; note = 2'-O-methyl modified nucleotide with phosphorothioate linkage
  modified_base 112: mod_base = OTHER; note = Nucleotide with phosphorothioate linkage
  modified_base 113: mod_base = OTHER; note = 2'-O-methyl modified nucleotide with phosphorothioate linkage
  modified_base 114: mod_base = OTHER; note = 2'-O-methyl modified nucleotide with phosphorothioate linkage
  modified_base 115: mod_base = OTHER; note = 2'-O-methyl modified nucleotide

SEQ ID NO: 1212 - RNA, 113 nt, synthetic construct; identical to SEQ ID NO: 819
  source 1..113: mol_type = other RNA
  modified_base 1: mod_base = OTHER; note = 2'-O-methyl modified nucleotide with phosphorothioate linkage
  modified_base 2: mod_base = OTHER; note = 2'-O-methyl modified nucleotide with phosphorothioate linkage
  modified_base 3: mod_base = OTHER; note = 2'-O-methyl modified nucleotide with phosphorothioate linkage
  modified_base 110: mod_base = OTHER; note = Nucleotide with phosphorothioate linkage
  modified_base 111: mod_base = OTHER; note = 2'-O-methyl modified nucleotide with phosphorothioate linkage
  modified_base 112: mod_base = OTHER; note = 2'-O-methyl modified nucleotide with phosphorothioate linkage
  modified_base 113: mod_base = OTHER; note = 2'-O-methyl modified nucleotide

SEQ ID NO: 1213 - RNA, 119 nt, synthetic construct; identical to SEQ ID NO: 820
  source 1..119: mol_type = other RNA
  modified_base 1: mod_base = OTHER; note = 2'-O-methyl modified nucleotide with phosphorothioate linkage
  modified_base 2: mod_base = OTHER; note = 2'-O-methyl modified nucleotide with phosphorothioate linkage
  modified_base 3: mod_base = OTHER; note = 2'-O-methyl modified nucleotide with phosphorothioate linkage
  modified_base 116: mod_base = OTHER; note = Nucleotide with phosphorothioate linkage
  modified_base 117: mod_base = OTHER; note = 2'-O-methyl modified nucleotide with phosphorothioate linkage
  modified_base 118: mod_base = OTHER; note = 2'-O-methyl modified nucleotide with phosphorothioate linkage
  modified_base 119: mod_base = OTHER; note = 2'-O-methyl modified nucleotide

SEQ ID NO: 1214 - RNA, 113 nt, synthetic construct; identical to SEQ ID NO: 821
  source 1..113: mol_type = other RNA
  modified_base 1: mod_base = OTHER; note = 2'-O-methyl modified nucleotide with phosphorothioate linkage
  modified_base 2: mod_base = OTHER; note = 2'-O-methyl modified nucleotide with phosphorothioate linkage
  modified_base 3: mod_base = OTHER; note = 2'-O-methyl modified nucleotide with phosphorothioate linkage
  modified_base 110: mod_base = OTHER; note = Nucleotide with phosphorothioate linkage
  modified_base 111: mod_base = OTHER; note = 2'-O-methyl modified nucleotide with phosphorothioate linkage
  modified_base 112: mod_base = OTHER; note = 2'-O-methyl modified nucleotide with phosphorothioate linkage
  modified_base 113: mod_base = OTHER; note = 2'-O-methyl modified nucleotide

SEQ ID NO: 1215 - RNA, 111 nt, synthetic construct; identical to SEQ ID NO: 822
  source 1..111: mol_type = other RNA
  modified_base 1: mod_base = OTHER; note = 2'-O-methyl modified nucleotide with phosphorothioate linkage
  modified_base 2: mod_base = OTHER; note = 2'-O-methyl modified nucleotide with phosphorothioate linkage
  modified_base 3: mod_base = OTHER; note = 2'-O-methyl modified nucleotide with phosphorothioate linkage
  modified_base 108: mod_base = OTHER; note = Nucleotide with phosphorothioate linkage
  modified_base 109: mod_base = OTHER; note = 2'-O-methyl modified nucleotide with phosphorothioate linkage
  modified_base 110: mod_base = OTHER; note = 2'-O-methyl modified nucleotide with phosphorothioate linkage
  modified_base 111: mod_base = OTHER; note = 2'-O-methyl modified nucleotide

SEQ ID NO: 1216 - RNA, 119 nt, synthetic construct; identical to SEQ ID NO: 823
  source 1..119: mol_type = other RNA
  modified_base 1: mod_base = OTHER; note = 2'-O-methyl modified nucleotide with phosphorothioate linkage
  modified_base 2: mod_base = OTHER; note = 2'-O-methyl modified nucleotide with phosphorothioate linkage
  modified_base 3: mod_base = OTHER; note = 2'-O-methyl modified nucleotide with phosphorothioate linkage
  modified_base 116: mod_base = OTHER; note = Nucleotide with phosphorothioate linkage
  modified_base 117: mod_base = OTHER; note = 2'-O-methyl modified nucleotide with phosphorothioate linkage
  modified_base 118: mod_base = OTHER; note = 2'-O-methyl modified nucleotide with phosphorothioate linkage
  modified_base 119: mod_base = OTHER; note = 2'-O-methyl modified nucleotide

SEQ ID NO: 1217 - RNA, 118 nt, synthetic construct; identical to SEQ ID NO: 824
  source 1..118: mol_type = other RNA
  modified_base 1: mod_base = OTHER; note = 2'-O-methyl modified nucleotide with phosphorothioate linkage
  modified_base 2: mod_base = OTHER; note = 2'-O-methyl modified nucleotide with phosphorothioate linkage
  modified_base 3: mod_base = OTHER; note = 2'-O-methyl modified nucleotide with phosphorothioate linkage
  modified_base 115: mod_base = OTHER; note = Nucleotide with phosphorothioate linkage
  modified_base 116: mod_base = OTHER; note = 2'-O-methyl modified nucleotide with phosphorothioate linkage
  modified_base 117: mod_base = OTHER; note = 2'-O-methyl modified nucleotide with phosphorothioate linkage
  modified_base 118: mod_base = OTHER; note = 2'-O-methyl modified nucleotide

SEQ ID NO: 1218 - RNA, 118 nt, synthetic construct; identical to SEQ ID NO: 825
  source 1..118: mol_type = other RNA
  modified_base 1: mod_base = OTHER; note = 2'-O-methyl modified nucleotide with phosphorothioate linkage
  modified_base 2: mod_base = OTHER; note = 2'-O-methyl modified nucleotide with phosphorothioate linkage
  modified_base 3: mod_base = OTHER; note = 2'-O-methyl modified nucleotide with phosphorothioate linkage
  modified_base 115: mod_base = OTHER; note = Nucleotide with phosphorothioate linkage
  modified_base 116: mod_base = OTHER; note = 2'-O-methyl modified nucleotide with phosphorothioate linkage
  modified_base 117: mod_base = OTHER; note = 2'-O-methyl modified nucleotide with phosphorothioate linkage
  modified_base 118: mod_base = OTHER; note = 2'-O-methyl modified nucleotide

SEQ ID NO: 1219 - RNA, 117 nt, synthetic construct; identical to SEQ ID NO: 826
  source 1..117: mol_type = other RNA
  modified_base 1: mod_base = OTHER; note = 2'-O-methyl modified nucleotide with phosphorothioate linkage
  modified_base 2: mod_base = OTHER; note = 2'-O-methyl modified nucleotide with phosphorothioate linkage
  modified_base 3: mod_base = OTHER; note = 2'-O-methyl modified nucleotide with phosphorothioate linkage
  modified_base 114: mod_base = OTHER; note = Nucleotide with phosphorothioate linkage
  modified_base 115: mod_base = OTHER; note = 2'-O-methyl modified nucleotide with phosphorothioate linkage
  modified_base 116: mod_base = OTHER; note = 2'-O-methyl modified nucleotide with phosphorothioate linkage
  modified_base 117: mod_base = OTHER; note = 2'-O-methyl modified nucleotide

SEQ ID NO: 1220 - RNA, 118 nt, synthetic construct; identical to SEQ ID NO: 827
  source 1..118: mol_type = other RNA
  modified_base 1: mod_base = OTHER; note = 2'-O-methyl modified nucleotide with phosphorothioate linkage
  modified_base 2: mod_base = OTHER; note = 2'-O-methyl modified nucleotide with phosphorothioate linkage
  modified_base 3: mod_base = OTHER; note = 2'-O-methyl modified nucleotide with phosphorothioate linkage
  modified_base 115: mod_base = OTHER; note = Nucleotide with phosphorothioate linkage
  modified_base 116: mod_base = OTHER; note = 2'-O-methyl modified nucleotide with phosphorothioate linkage
  modified_base 117: mod_base = OTHER; note = 2'-O-methyl modified nucleotide with phosphorothioate linkage
  modified_base 118: mod_base = OTHER; note = 2'-O-methyl modified nucleotide

SEQ ID NO: 1221 - RNA, 117 nt, synthetic construct; identical to SEQ ID NO: 828
  source 1..117: mol_type = other RNA
  modified_base 1: mod_base = OTHER; note = 2'-O-methyl modified nucleotide with phosphorothioate linkage
  modified_base 2: mod_base = OTHER; note = 2'-O-methyl modified nucleotide with phosphorothioate linkage
  modified_base 3: mod_base = OTHER; note = 2'-O-methyl modified nucleotide with phosphorothioate linkage
  modified_base 114: mod_base = OTHER; note = Nucleotide with phosphorothioate linkage
  modified_base 115: mod_base = OTHER; note = 2'-O-methyl modified nucleotide with phosphorothioate linkage
  modified_base 116: mod_base = OTHER; note = 2'-O-methyl modified nucleotide with phosphorothioate linkage
  modified_base 117: mod_base = OTHER; note = 2'-O-methyl modified nucleotide

SEQ ID NO: 1222 - RNA, 118 nt, synthetic construct; identical to SEQ ID NO: 829
  source 1..118: mol_type = other RNA
  modified_base 1: mod_base = OTHER; note = 2'-O-methyl modified nucleotide with phosphorothioate linkage
  modified_base 2: mod_base = OTHER; note = 2'-O-methyl modified nucleotide with phosphorothioate linkage
  modified_base 3: mod_base = OTHER; note = 2'-O-methyl modified nucleotide with phosphorothioate linkage
  modified_base 115: mod_base = OTHER; note = Nucleotide with phosphorothioate linkage
  modified_base 116: mod_base = OTHER; note = 2'-O-methyl modified nucleotide with phosphorothioate linkage
  modified_base 117: mod_base = OTHER; note = 2'-O-methyl modified nucleotide with phosphorothioate linkage
  modified_base 118: mod_base = OTHER; note = 2'-O-methyl modified nucleotide

SEQ ID NO: 1223 - RNA, 117 nt, synthetic construct; identical to SEQ ID NO: 830
  source 1..117: mol_type = other RNA
  modified_base 1: mod_base = OTHER; note = 2'-O-methyl modified nucleotide with phosphorothioate linkage
  modified_base 2: mod_base = OTHER; note = 2'-O-methyl modified nucleotide with phosphorothioate linkage
  modified_base 3: mod_base = OTHER; note = 2'-O-methyl modified nucleotide with phosphorothioate linkage
  modified_base 114: mod_base = OTHER; note = Nucleotide with phosphorothioate linkage
  modified_base 115: mod_base = OTHER; note = 2'-O-methyl modified nucleotide with phosphorothioate linkage
  modified_base 116: mod_base = OTHER; note = 2'-O-methyl modified nucleotide with phosphorothioate linkage
  modified_base 117: mod_base = OTHER; note = 2'-O-methyl modified nucleotide

SEQ ID NO: 1224 - RNA, 118 nt, synthetic construct; identical to SEQ ID NO: 831
  source 1..118: mol_type = other RNA
  modified_base 1: mod_base = OTHER; note = 2'-O-methyl modified nucleotide with phosphorothioate linkage
  modified_base 2: mod_base = OTHER; note = 2'-O-methyl modified nucleotide with phosphorothioate linkage
  modified_base 3: mod_base = OTHER; note = 2'-O-methyl modified nucleotide with phosphorothioate linkage
  modified_base 115: mod_base = OTHER; note = Nucleotide with phosphorothioate linkage
  modified_base 116: mod_base = OTHER; note = 2'-O-methyl modified nucleotide with phosphorothioate linkage
  modified_base 117: mod_base = OTHER; note = 2'-O-methyl modified nucleotide with phosphorothioate linkage
  modified_base 118: mod_base = OTHER; note = 2'-O-methyl modified nucleotide

SEQ ID NO: 1225 - RNA, 117 nt, synthetic construct; identical to SEQ ID NO: 832
  source 1..117: mol_type = other RNA
  modified_base 1: mod_base = OTHER; note = 2'-O-methyl modified nucleotide with phosphorothioate linkage
  modified_base 2: mod_base = OTHER; note = 2'-O-methyl modified nucleotide with phosphorothioate linkage
  modified_base 3: mod_base = OTHER; note = 2'-O-methyl modified nucleotide with phosphorothioate linkage
  modified_base 114: mod_base = OTHER; note = Nucleotide with phosphorothioate linkage
  modified_base 115: mod_base = OTHER; note = 2'-O-methyl modified nucleotide with phosphorothioate linkage
  modified_base 116: mod_base = OTHER; note = 2'-O-methyl modified nucleotide with phosphorothioate linkage
  modified_base 117: mod_base = OTHER; note = 2'-O-methyl modified nucleotide

SEQ ID NO: 1226 - RNA, 118 nt, synthetic construct; identical to SEQ ID NO: 833
  source 1..118: mol_type = other RNA
  modified_base 1: mod_base = OTHER; note = 2'-O-methyl modified nucleotide with phosphorothioate linkage
  modified_base 2: mod_base = OTHER; note = 2'-O-methyl modified nucleotide with phosphorothioate linkage
  modified_base 3: mod_base = OTHER; note = 2'-O-methyl modified nucleotide with phosphorothioate linkage
  modified_base 115: mod_base = OTHER; note = Nucleotide with phosphorothioate linkage
  modified_base 116: mod_base = OTHER; note = 2'-O-methyl modified nucleotide with phosphorothioate linkage
  modified_base 117: mod_base = OTHER; note = 2'-O-methyl modified nucleotide with phosphorothioate linkage
  modified_base 118: mod_base = OTHER; note = 2'-O-methyl modified nucleotide

SEQ ID NO: 1227 - RNA, 117 nt, synthetic construct; identical to SEQ ID NO: 834
  source 1..117: mol_type = other RNA
  modified_base 1: mod_base = OTHER; note = 2'-O-methyl modified nucleotide with phosphorothioate linkage
  modified_base 2: mod_base = OTHER; note = 2'-O-methyl modified nucleotide with phosphorothioate linkage
  modified_base 3: mod_base = OTHER; note = 2'-O-methyl modified nucleotide with phosphorothioate linkage
  modified_base 114: mod_base = OTHER; note = Nucleotide with phosphorothioate linkage
  modified_base 115: mod_base = OTHER; note = 2'-O-methyl modified nucleotide with phosphorothioate linkage
  modified_base 116: mod_base = OTHER; note = 2'-O-methyl modified nucleotide with phosphorothioate linkage
  modified_base 117: mod_base = OTHER; note = 2'-O-methyl modified nucleotide

SEQ ID NO: 1228 - RNA, 19 nt, synthetic construct
  source 1..19: mol_type = other RNA
  modified_base 16: mod_base = OTHER; note = Nucleotide with phosphorothioate linkage
  modified_base 17: mod_base = OTHER; note = 2'-O-methyl modified nucleotide with phosphorothioate linkage
  modified_base 18: mod_base = OTHER; note = 2'-O-methyl modified nucleotide with phosphorothioate linkage
  modified_base 19: mod_base = OTHER; note = 2'-O-methyl modified nucleotide
gtcatagttccattattgc

SEQ ID NO: 1229 - RNA, 84 nt, synthetic construct; identical to SEQ ID NO: 840
  source 1..84: mol_type = other RNA
  modified_base 1: mod_base = OTHER; note = 2'-O-methyl modified nucleotide with phosphorothioate linkage
  modified_base 2: mod_base = OTHER; note = 2'-O-methyl modified nucleotide with phosphorothioate linkage
  modified_base 3: mod_base = OTHER; note = 2'-O-methyl modified nucleotide with phosphorothioate linkage
  modified_base 81: mod_base = OTHER; note = Nucleotide with phosphorothioate linkage
  modified_base 82: mod_base = OTHER; note = 2'-O-methyl modified nucleotide with phosphorothioate linkage
  modified_base 83: mod_base = OTHER; note = 2'-O-methyl modified nucleotide with phosphorothioate linkage
  modified_base 84: mod_base = OTHER; note = 2'-O-methyl modified nucleotide

SEQ ID NO: 1230 - RNA, 27 nt, synthetic construct
  source 1..27: mol_type = other RNA
  modified_base 24: mod_base = OTHER; note = Nucleotide with phosphorothioate linkage
  modified_base 25: mod_base = OTHER; note = 2'-O-methyl modified nucleotide with phosphorothioate linkage
  modified_base 26: mod_base = OTHER; note = 2'-O-methyl modified nucleotide with phosphorothioate linkage
  modified_base 27: mod_base = OTHER; note = 2'-O-methyl modified nucleotide
gtcatagttccattaaagccattgctg

SEQ ID NO: 1231 - RNA, 93 nt, synthetic construct; identical to SEQ ID NO: 843
  source 1..93: mol_type = other RNA
  modified_base 1: mod_base = OTHER; note = 2'-O-methyl modified nucleotide with phosphorothioate linkage
  modified_base 2: mod_base = OTHER; note = 2'-O-methyl modified nucleotide with phosphorothioate linkage
  modified_base 3: mod_base = OTHER; note = 2'-O-methyl modified nucleotide with phosphorothioate linkage
  modified_base 90: mod_base = OTHER; note = Nucleotide with phosphorothioate linkage
  modified_base 91: mod_base = OTHER; note = 2'-O-methyl modified nucleotide with phosphorothioate linkage
  modified_base 92: mod_base = OTHER; note = 2'-O-methyl modified nucleotide with phosphorothioate linkage
  modified_base 93: mod_base = OTHER; note = 2'-O-methyl modified nucleotide

SEQ ID NO: 1232 - RNA, 21 nt, synthetic construct
  source 1..21: mol_type = other RNA
  modified_base 18: mod_base = OTHER; note = Nucleotide with phosphorothioate linkage
  modified_base 19: mod_base = OTHER; note = 2'-O-methyl modified nucleotide with phosphorothioate linkage
  modified_base 20: mod_base = OTHER; note = 2'-O-methyl modified nucleotide with phosphorothioate linkage
  modified_base 21: mod_base = OTHER; note = 2'-O-methyl modified nucleotide
gtcatagttccatgaaagcca

SEQ ID NO: 1233 - RNA, 85 nt, synthetic construct; identical to SEQ ID NO: 846
  source 1..85: mol_type = other RNA
  modified_base 1: mod_base = OTHER; note = 2'-O-methyl modified nucleotide with phosphorothioate linkage
  modified_base 2: mod_base = OTHER; note = 2'-O-methyl modified nucleotide with phosphorothioate linkage
  modified_base 3: mod_base = OTHER; note = 2'-O-methyl modified nucleotide with phosphorothioate linkage
  modified_base 82: mod_base = OTHER; note = Nucleotide with phosphorothioate linkage
  modified_base 83: mod_base = OTHER; note = 2'-O-methyl modified nucleotide with phosphorothioate linkage
  modified_base 84: mod_base = OTHER; note = 2'-O-methyl modified nucleotide with phosphorothioate linkage
  modified_base 85: mod_base = OTHER; note = 2'-O-methyl modified nucleotide
